United States Patent Application Publication US 2026/0058010 A1 - sequence listing, part 20

SEQ ID NO: 229 - DNA, 1946415 bp, Homo sapiens
  source 1..1946415: mol_type = genomic DNA
ccacttcctcctctgtaaagatgacagacgagggagatctcacgttctgggggtgccctatagccctcttttggccagaagcggtggatcacgcctgtaatcccagccctttgggaggccgaggtaggaggattgcttgagcccaggagttcaagaccaatctgggcaacatagggaggctacgtctctcaaaaaataaataaatacataaataaataaaaataaagccagcgtcgtggcggggcgcctgtggtccctgtggtcccagctactctggaggctgaggcgggacgatcgcttgagcctgggaggcagaagttgtagtgagctgagatcgagccactgcactccagcctgggcgacagagcaagacactgtctcaaagaaaaataaataaataaaataaggccctctttttccgggaccaacagactctgagggcagggacaaactgacccagcctaaactgcctcgccttccctgctcccgggaaaggggttttccctgagggaaggtagcatcttgccattttcttcctgcacagctttgccttcccagggatccacccattgccacctgaggaaatgccttggagcccatctaatccccagcccagctacttgggacgcctacagagactacattgtcagaggatgcatcttcctctagtcttggagggtttcttttcaatatgatcccaccggtgcatgcaaggctcaattctacatcaaaaaactaggcccactcctgtcgccgagacccccaggcttcaggtcctgtcacagtgaccttgttatcacccccagcagcccccaggtattcactctgcataggctatatactgggtgctgcactagggaggctacctacgtggcgcatgcttcccttatccctgaagagcttaggatgttgtaacttcttcacactaggcctcttacttcttggagatgtcagtatctgggtaaataatccttctaacatccttttggtcttatgaagcccattcttgtcctctgccctacctcagcttccccctccctccatgatcagaccttagaccttgtcaggtccaaggactgcaaccctcacagtatcccactctgaccaccacctcctatctagagcaatggagagactttgtaggtgaaagctgtctttgctactggttctcctatgctccctcgcctggctcctgcaggcggttgacttcaccagggacacagtggccagtgcccagcaggtcccactcctctcaccagctccaggcagttttattgtagagtaactcttctgagacaccgctcctttccccagcacctaaggaagtatttctagtaagttccagtggtatagcatcggtgactctcccgacaagcagagggccatggctgggttcctctgatgaggtgcaggggcagggcactaagaggggaggactctcctgagttctctacctgagccctagactagtagctgctcctcctatacttcctactagtctgtgcctggttactccacttccctgttgcaattaacaattccctatgtacacttttcctgttcaaatgactgtgtggcttctctttcctaatcggactctgaccaatacgctatcatttgccaacaactcccaaagttttatcagtgactcagacctctaacctgaactccagctgcctccatgagatatccatttggatgtttaatggacatttccaaagtgatatgccctacagaactcagaatcttccctctcaaaccaactgctcagcagtcttatgatcttagttgatggcaattcagaagtgaattgcaggacacccggtttgtatctgcagagagaactggagaactgcttagtgtggaaaacccacacatttggtttcagaagtgtgtgagtagaaacagttttccttttatgtttgttggatggataatgatgaacctagcaggacacagaaagctaggcagcagtggaactgagaatgaagttatagttaatagcagagaatgaaaaagaaaagacagataaaacattttgaagaaaggacagtaatgtattcccaacaggtaggatttacaggatggagagaagaggcaaagataactacaaaatttctagcctgagagactggtagaaaaaaatggtggtatcaggaacagacaggggttattaagaaaaaggattggatttttaaaataaagaagatctggtgtaaaattatcctcaggaaaactggaaaactaggcatgtacttctctccatcatgcccttgcacagtgcagtccttctgcctgtccatgcctcgcctccccctccctaggattcctcttcctctcttaagacccatctcaaatatcacctagacttgtaagtaatttacatgaaactggatacctgaggtatccctttgaaagtttttaataacaagttactgttatcttttactaagtccaactttatattcgccattttaactagcatcatttctgtttccaagaggtatttggtgtgaaagtgcaactaagtttactgttaatcaagatcagaataaaagaatctaccaaaaaaattaacaagatcccccttttaatgcataatctttcatccatcaggctgtaagttaaatacctaacataaaagaaagctgtatgttttatggatatgtacatatataactgcagggaatatgatttggaaggatgtacacttagagaagactggagtcacaagtggtagtcaagggagtcttcagatttctttttgtatttcaattttgagagaaatacatacatatgtattataattttaaatttttaatgaaaaaaagtatttttccttttttttcttgatctgtcactacattatatttttccaatatcagctaaacatttgcttcccagaaagcttagttgtcttttcaaaatttattcaggttaaaataaaagatttagacaatgaattaaaaatctaagatggtatttgcctactttatacagaacagtacattgatgctgctaaagcaattaaagtataatttttctttttttttttttttttttttttgagatggagtctcactctgtcacccaggctgaagtgcagtggtgcaatctcagctcattgcaacctctgtctcctgggttcaagcaattctcctgcctcagcctccccagtagctgggatttcaggcgtgcaccaccacgcccagctaatttttttgtatgtttagtagagacagggtttcaccatgttggccaggctggtctcgaactcctgacctcaaatgatctgcccgcctcagcctcccaaagtgctgggattacaggcatgagccaccacacccagcctaaagtgtgtactttttcttagctcctatatgcagtgctccttccccatactgaatgtctgaatttttatctgagacatagtatttcagatggtcattacttacgggtggtcattaatagttcctccctgcttctaaccttcctctcctcattttaaattaaattacgctacattattgtggattagaaagtacattaatattaagtgaaaaaatatgatctgatgagtaagtggcaagagtgttaacgtatgaatattaagagttgttctgaggcctttttgcttttctgggggttctgtgcttgtggtagaactcttggttattttataaatagttcctgaaaagtgagagagtacagctggaaatcagatttctgatgaataaatcaaaccctattaagagaaacaggttcaagtaattttaaaaccatttgaattttcataaatgttttgttaatgattaattataaaaaaaaacagtgactctagctggaggcttttgtgtgtttgcttttgagtcagctaggaaaaggaagaaaaattcaagcttagtcaattgtggttttcactgaatcttttttaaagtaatgagctggtttgttttcttcatcactatagcaacttaagctagtttttgcttttgatttttatttctcctagagaaacttagcatgcactgctcattagacttgggcatactaaggaatatctgtggtaattaagttaaaaatcagatcagtgctttgtgctgtgtatagttgcagatgtctgcatttcactaatattctttggaaacatctggataccagttaacataaaataactgtttagttggtttctgttcagaatagaaggaatgacttaaaagttcccattgtagtacatacgtcattctatccctagcccttcctccagctttactgagattgataaataataaacatcatgggtggtgtgtctttagtttcctctggtgagctggatgcacagattactttgtcagcagggtggtcttgatttttaggccatgtgtctaatggcatcagctctgtggccgacacctgtgtaccaagcccattcactatctagcttagccagccgtggactcctgctctttgttaaaagtatttaccttcattcctactagcacagttgaccaaagacccagttgatcccaaacactagtaatgcatcaatggagtctaacagagttttaagatgtgtgtgtgtgtttgggggtggggggtgtagagatgggatctcactattgttgtccaggctggtcttgcacacctgagctcaagttctcctgcctcagcctcccaatgtgctaggactacaggcatgagccaccatgcctaaccctctaagactttgggatacaaaaacataatttactttccttcatttctggaataaaacatctcttcttcctccccctactttctgttctgtgcccctgtttgatctctgttggtcctgttcaccttcagccttctctgctgaaggaggaaaggcttggttttataaaaagtgacaatattcagaccacataagatccttcttgcttcattttggattaaatattttaagattttctgattttcttgtatgcatatgtatttacctattatttgactttattgaataacttcaaattgagtatatttgaatgggaatgggcattaaaaagtgctaagctttccctgcctttcagaactttgtatgtatatgtcacatcattttgtccttcacattctccagttgtgctaatttttcccaatccattaagtagagtaccttcctttttggagtcttacttttttttttttttttttttttgaggcagagtctcaaaccgtcgcccaggctggaatgcagtagtgcaatctcagctcactgtaacctccgccttagcctcgtgagtagctaggaaatacaggagcatgccaccacacccagctaatttttgtattcttagtaaagatgggggtttcaccatgttggccaagctggtctcgaactcctgacctcaagtgatctgcccagctcggcctcccaaagtgctgggattataggcgtgagccaccacatccggcctccttacttaaatatcttaatgtgccttagaatgtagttaagaattttcaggtgacagtatatttttgatagttatctttggtttccaaacccagagaaggaagagtaactggctttttctctgtgtgggtacattgtgtcttattggagattgttttgtctcaagtattgctgcagactattttattaatgggtgcaactttaaaatttttttttttcagattaacggtttaggtatcccagtactcggtatttgccaatttctagaattaaaaacatgtgtgtatcactggttaactagaaatttaaaatgaaaatgtttcttctttagcccaggcaatatcacttgcattcacttctatcccctccttgtccctactctgttggctccagggcttcttccactaagctggtactttctttatacctcctgtacttccattcactgaacctttattggttcatagcctacagaaaatgcctgtggtgtgagaggtaatttgtgaaactgcttctcttcactgtttagcaggttgagctctctaaatgggtgtagctgggaaagaaaatttaactttacaaacaagaattcctgggttccatccagtggaacatgtcttttgttatacacacacagtttctgactcatatcattccatgacttatgataaaatggacattctgtttacactgttgtgtggaaggaggggtctggttcctaatttttagtaacatctatttctagaatattaggcttgccatttgaatgcttctgtttgatttatgaatatcattggttccagcagtttttagctccctgctaaatgcaagttaaaatttttaagtttctaagttaaaagaaagtaacttttcctccacttaagaaagcaaggaaaattaaaaataatgtagtgatgacttccacaggctctaaaagagcaatgaaaaaagtgatttatgtgtgggagaagaaatactagttcttaattaatacattgttttaccacttcccgtgaatttatgtagaagtaatgaaaccaaggtttaagtcatttgttcaaactcctgtcagtttagactttttaattgctttgttacatgccattgctttgtaatacttgttatagcagtggtaacagttgagatttgcctgtttgaccacttgcagggcaccgtgccagattccccatgtgcaatgttcctcgcagttgtgacgcccatcgtaggagggcggcgttagcacccctccatgcaagcggatggtgcaggctgggtcgcctgggcacagcgcctgactattttcctggcttagtgtagttatcattaaatatgtggtattacttagaagcattttgaataatttgaaaagcacattttagtgttgaaacaatttttttttgagaaaaggtctggctctgttgctggggtggagtgcagtgacctgagcgtagctcactgcagcctgcaactcctgggctcaagcgattctcctgccccagcctcctgagcatctgggactacgggcacatgcccccacacccaactcaattttttttaagatacaaaggattcatcttaatattatttacaatttttttttccttttctgtgggcctcatctgactggaaagcctttcaatttttttattttttaaattgtaaattgacaaattgtagatgtatatttatgaggtacaaagtaattttatgatttatgaatacaacattacataattaagtcaagctgattaacctgttcaccactggaaacaattgcaaatcattatcattttttctggtgagaacatctgaaatttactcagtgattttgaaatgtgcagtactttttgttgttgttgtagaaatgaggtctcactatgttggccaggctggtttcaaactcctgagctcaagtgatcctcccacctcagccttccagtgttgggattacaagcgtgaactaccatgttgggccaaatgtgtaatctattattatttactgtattcaccatgctgtgcaatttatctccaagaaatgtattcctcctgtctaattgaggctttgtgccctttgaccatcatctccccgtcacccccatccccaatgttgtatactgagtcctttcatgatatgtatggaggcttatggtaagttatttaaaagtacatgtatgtcaaaattttttgtggccatagcttttctttctttttaaaattttaagagtcagaatattcgtatattaattcagcatgtatttgagtgcctaatgtatgccattttctatgttaggaaccaggaattaaagcagtgaacataacaaagtctgccctcgtggtgctaacttgccaggtagggaagccagatactaaacacatgtataatgcaaagtcagtaataataaacgatatgaagaaacaagtaaggtaggagaggcaggaaagtgggagtgagaaagaggtgctcttttaaatacagtggtcagggagagcctctcagaatgaagtttttaacagagacctgaatgagatgggggagtcagctatacagatatctgctgtgtgctagaaaaattacctgtaattttgcattctaaaagtttaatgagtacatttatttcacaatttgagaatcaattatatacaagatatagttgtaagcacatactcccctaaatataatttgtttttacagtagaccaaataagtatgttcagcttagaatatgctctttatgatctgtataataaatacattctcttaaaatattattaatattaaggttgatgttttcagaaacatataaaaaagctagcttttaaaattgactagggaagttctctcaaactgccagtccctgagatattgtatattttctatctgaaaaacttttattctcagaattctttaaaagagctgtccctgaggctcccattacttacctgtgactcccagtggaaatcgtacccagcccctcgagaggggctgaatctgttgagagtgggagggtagaaaaaatgctgcagcttcttgtgggtaaacttcacacacaaacacccagtgccccaagcactgtgcagtcaaacatcaaccctgctcagactttcctccttgggattgagaagcaatggattatagagaaagaaaggtggcttagcactccaaaacttggaagggtaattgaccaagaccccccaaagccaaagcagtgggcatccccactttctgtataccctataccaacacgtaatggctactagatacaggggcactagtacctgtctgcttggctacctccccttcttgcagaagtggtgaaggcaatcactcaacctcaggaagggaaaatggctttctcatcttcaaattgaaagaggttggcagtgggtgaggagaataacaagtaaggatctctttcaatatacccatttgaagccaaaacctctgtttagacatacggtattttgaacctggtgactattcattgaccatgtttgtgaattatcagaaagcagaattcttgccaggcatagcggctcatccctgtaatcccagcactttgggaagccaaggtgggaggatcacttgagcccaggagtttgagaccagcctgggcaacatggtgagatcttgactctacaaaaaattcaaacattagctgggcatggtggcatgcacttgtggtcccagctactcaggaggctgaggtgggaggattacctgagcccaggaggttgaagctacagtaagcagtgtctgtgccactacgctcagcctgagcaacagagcaagaccctgtttcccacccctacccaccccctaaaaaagcaagctgaattcttgaactccctgcaaccaggtcacgcaaaccaaaggtaaaaggaacataaaaaagccttctggaaagtgtacagaaattcattgcagggtgatttttgtcttgtgaaatcatagttactgttattagcagcttttttaaatgttttatattcattttttatggtgttctgatgtatgagctgcttcaagtgtttttggacatagcttgggtataaaatgtaaaaagtggatattttcaatttgtagctttcttttttgaaacttactgaaatttgttctaaatatatctccttctttctcacccaccccaacacattttttaaaaaacaccaccaggtatccgttatagcactgatgtgagtgtagatgaagtaaaagctttggcttctctgatgacatacaagtgtgcagtggttggtaggtgatcgcttttcttgctacctaatgagaactctggggaaatatgtttacacacatgttactgttaagatgctatagaaatataccttatcagaactgatttttttttaagttgtactctttaagacctgcatcatttttcaattactctaaattaagatatagcctttttttacgggagggattttttttacgggagggagctaattggattttaagtctagatctttgttttcaattcctcaacatattctataaataagaccaaattatagtagaaggagagtaaataagctattatctttttaaagtggtgaagagcactgattaaatatatattagagccccagcccccgccccagctgcgcgggcccccgcctggcccatggactgcacagcccagcgggcgccttgagcgcggtgcgggtcctcggagcacccccgaggtgagcgcaagcaaggtccggcatcatgtgctaggttattcccagtgcgaggccacacttgggccgtcggagcagcccctcctcacttcaggggtcaccctccccaagacccattgccccatcatggccggggaccggctccccaggaaggtgatggacgccaagaagctggccagcctgctgcggggcgggcctgggggggcctggtcatcgacagtcactccttcctggagtacaacagctggcatgtgctcagctccgtcaacatctgctgctccaagctggtgaagtggcggttgcagaagggcaaggtgaccattgtggagttcatccagccggctgcacgcagccaggtggaggccactgagccacaggacgtggtggtctatgaccagagcacgcggccgcagacagcttcctctccatcctgctgagcaagctggatggctgcttccacagcgtggccggctgcttccacagcatggccatcatcacggggggcttcgccaccttctcctcctgcttccccgacctctgcgagggcgagcctgctgccctgctacccatgagcctctcccagtcctgcctgctcgtgcccagcgtgggcctgaccctcatcctgcctcacctctacctgggctcgcaggaagacgtcctgaacaaggatctgatgacgcagaatggaataagctacgtcctctatgccagcaactcctgccccaagcctgacttcatctaccagagccacttcttgcaggtccccatcaacgacaactactgtgaaaagctgctgccctggctggacaagtccatcgagttcatcgataaagccaagctgtccagctgccaagtcatcgtccaccatctggccggcatctcctgctgtgccactatcgccatcgcctacatcatgaagaccatgggcatgtcctccgaagacgcctacaggtttgtgaaggaccagcgcccgtccatctcgcccaacttcaacttcctgggccagctgctggagtaccagagcagcccgaagctgctggccgccgtgcagggcgacgcgggcaccccctcaggaatgcaggagcctccccccagccctgcggccggggccccactgccatggctgccaccacctacctcagagaccgctgccaccaggagtgcggctgccagggagggcggcccgagcgcgggcaggaagcccccggcgccccccacggccaccagcacgctgcagcagggcctgcgcagcctgcgcctctcctcggaccacctgcaggacaccagccgcctcaagccctccttctctctggacatcaagtcggcctacgcccccagcaggcggcccggcggcccgggcccagcgaccccggcgaggccccgaagctctctgaaagctggacagccagtcggggccatgctgggcctgccctcgccctgcccggacgccgcgcccaggcacacccacggcccggcgcgctatcccgcgcgcggcctgaacttcggctacgcggctgccgggccctggccagccggccagccccggagcctggacgccaccgctcgactccctgaagcgtcctcggtgcttcagccccgagggcgtgcaagggccgggcagggtgctgtttgcgcccttcggccgggcgggcgccccggaacccaacggctgcagcgacctgccacggcgggaggcagcaagggctgagcccgggacgcgcggaccagctggtcagacgagctggccccggattcgcacttcaagtgctgcagctgccagatggagttcgaggagggcatggtggaggggcgcgcgcgcagcgaggagctggccgccctgggcaagcaggggagcttctcgggcagcgtggaggtcatcgagatgtcctgacccctccgctgccctcggctccgccgcccgcagctgggcagttataaatatatattatatataatgcaaagaaaggcaaatggttttactgcgatttttatccagaagtaaatatttcgattttttatttatttaagctgttcattctggcactgatttggcaacagtgcgggtggtcctcgagctctatttttactgtctggtatttaaaccgaaacacgcgtttctaagcaataagaggccaccttcagtcgcaagttgcaggccaggcctggggcccctccctgttcccccgccccaggaaacactgctgacatttgcagaggctgccgagctttcgtgaactttttacacaagagaaagttgaaaaaaaaaaaaactttcttgccacaaaccgagccgcagaaacacccttcttcccccacccaccgcccctgctctctcccttcgggctccgccccaaagccataggctgggggagcaggacctggtgtgccccagagaggtgcggccagccctccaccagctctaggcaccaaatcttggtggcagggagggcaccccgctgcccgttgccccagagctgttccctctcaggggaggacatgcattgggccccatggtgccagggcgttgagaggggctgaggaatagaacagtgtgtgtaggggcttggggcagggggttctggagggtcagatgaggcggagcccaggggaggatgggggtgttattaatgccccaactcctgccagagccccagtccagccactgagtgcctcagaaaggccattcccagagggctgcggccctcccttctcctttgcccctgcccccagagctacctgactggcagggcggcactactgcaggagaggagcttggcctccgggggtcaggcaggaggggggcctggctagcctgtgctggctccactgggcggggagccctggaccgccaggtatgaggagggggtgggcttagggtcctgttccaggtccgtcccccacctagcaaggccccaggcaggacttggaaaccaggtgtgcacctgcaggctgaggggctccatgagcaggtgctgcctcgcacagggagttcaggcgccagccaagcccctgtgcttctggggtaggcctgcttcacttagggagcgctgcctcaaggcagataaagcccccttgttgacccgacctgcatgggggcctctcaggagagaaactctcgtgcgcccctttcccagggcgccctctttctagacagcattccagcccccaaacacaggtggcttttgggcccagatgggtcagcctgctgctcctggcccataccctctcaggccgttgggactcctgcccttcagatgtcctagggtctaggagtgggccagtcaccctgggaagaggccaggggcttggcaggaggggcggcccaggcgggacccagtcctgagtcctggagcagggccagggaggcgcccgccccaccccagccagccgccttctctgctgtttcttctatttgttcttcttttcacccacagccttgtgttcctgtcaaccctcctttcagcaaaagtcctgttcccgttccctctgtccccacccactcctgttccccaagaaaataagctatcattgttgcatttgcaatctatggattagaggtttaagtatttattattattggttaattattattatgttttatatatatatattagaacttggctagccaattttattgaacaattcctgttcaataaatgttgtttaaagtacagttgagaaaacgatggtaggtttatttcttgaactttcagaaattcaagcttaaagcatcacacgtttttctaatatcatgtggcgctttctgtcattttacttttttaacctttatatggaatagcaaccatcaaccttctctttcagatgtgccgtttgggggtgctaaagctggtgttaagatctatcccaagaactataccataagtatgaaagtttttgtttttgtttttgtttttgtttttgcttttttgacacagagtcttgctctgtcgcccaggctggagtgcaacggtgcgatctcggctcactgcaacctccgcctcctgggttcaggcgattctccttgatccagtaactgggattacaggtgcatgccaccatgcctgactaatttttgtatttttagtagagagggggtttcaccatgttggccaggctggtcttgaactactgaccgcaggtgatctgcccaccttggcctcccagagtgctgggattacaggcatgagccaccgcacccggcctcaaagtgatatttgtgcacacagtgcatttatgaaggacttgaaattactgggcttctctgtatcccccatatcagtgaaatcaatagtccccattgcttttcaaatggaatgaaaaaagtaaagaattaactcattgagtgttttgccatataaaggtcacctacttaatatctatatcctttatcattttctgttttgtttggttttgtttttatgagtcttgttttttttttttttttttgctttttgtattattattttcttatttaaaaggtaattaatatcttcatattattagacacctatacccatatttaagaagtactgtgatctggctgggtgcggtggctcacgcctgtaatcccagcactttgggaggccaaggcaggcggatcacgaggtcaggagatcgagaccatcctggttaacacagtgaaaccccgtctctactaaaaatacgaaaaattagtccggcgtgttggtgggtgcctgtagtcccagctactcaggagactgaggcaggagaatggagtaaacccgggaggtggagtttgcagtgagccgagatcatgccactgcactccagcctgggtgacagagcgagactttgtctcaaaaaaaaaaaaaaaaagaatcactgtgatctaattagccaggcatagtgacgcacacctgtaatcccagctactcgggaggctcaggcatgagaactgcttgaacccaggaggcagaggttgcagtgagacgagatttcaccactgtattccagcctgggcaacagagcaagactctgtctcaaaaagaaagaagaaaagtagtactgtgatctgaagtttttaggtcaggatctcatgctagtgacaaatatcttaactaagccaataaaaaccttactttttatcctgtcagttccaagtaaattcaaactggttgtcacaatgctttacataatactaaattatctatatacaaacataaacagatatgatttttattctctttaaaattcaccatttagatggaatataattatattacaattaatcttaattaagatttggtatatttttcagtggggaattaatagaatgggaatttgagtcctggttctactatcttgtttttataacctacttttttgatcccttattttctcacctttaaaatggcattgcctaccttatgagttgttctaaggatgagaagacatgaaaatgtactataaatagaaaataagatgctagctataatctcaagcgatttttgtatctttttttatttttattgttttcttattttacaggataacgaactggaaaagatcacaaggaggttcaccatggagctagcaaagaagggctttattggtatgtgtagccacatagattttggcataaagtgggaacatctaaaaaaatctttttttttttttttttgagacagagtcttactctgtctcccagactggagtgcagtggtgcaatctcctccacctcccgggttcaagcaattctcttgtctcagcctcccaagtagctgagactacaggcatgtgccaccacacccagctaattttcgtatttttagtagagatggggtttcgccatgttggtcaggctggtcttgaactcctgacctcgggtgatccacccatctcagactcccaaagagctgggattacaggcatgaaccactatgcccggcctcctactatttgtgataggagcttttgccaaacatacaacatttttgaagacactgatcttcgtttgcttgatgtcttcgtatcttactattatctgtgtttatatgttctttgtgtgtgatctgaacattctttcctatgatatgtaaatatttgtcatttaccttctaattttcaggcagtttaaacctctctatacatatatttttaatctagaaggcttctaatttgtttgaatagaatatacataattatttaataaaatgcttgccctatcagtatagttaatagaatgttaatagttacttaataatataatacttgccctatcagtatcagtatagttaaacaaaataaggtctacttaaataggaaataaagtgtatttttctctactttctttctcagcatttcccccaccatggacaaatgcctatgaaattaaactataaagtctgggcatggtggctggtgcttgtaatcccagcatttttggaggttttggaggctgaggtgggaggatcacttgagcccggaagttcaagaccaccctaggcaatatagcgagaccccgtctctacaaaaaatgaaaatgttatccaagcgtgatggtgcatggctgtggtcccaactactaagatgggaggatcccttaagcctgggaggttgaggctaccatgagctgtgatcatgccactgcactctggcctaagtgacaaaacaagaccacatctcaagaagaaagagaaaagaaataaagctattcagattcatttttaggaaaaaagtcatgaaataaatgtcatgaaataacctaatatagaaatacagtaagtataggtaactctaaaacttgactagatttggcctgtctttcataataaaaggcatttgggcctttgacgtgccgcatacccagcactactgtgaatttgtgcatcattacgaggagcctattaacatgagtgaactatctcactcacacttttataggagtacctaccgattctgagatatggtgaattgaagtcatgttcagcctgttaatagccttcataattttcaaaaggtctttcctcctcacctaaatctcaaacacattttatagtcttgaatggtttcagactttattcagtcatatttatcgcccatatctgcaatatctccagctaaattttatcagtcttgacaagtacctaataattccaaaggtcaaaaagtgattcattggaatactgaaagaaaacacagcttaaactctagtaacttgatttatttgcctaattcgcaaaggcctcattgacccatgatgcagctaaattgacgtcttggcccagacagctttgaagcctaggaggcaggcaaagggagttttttctctcacttctcggcaaaccttcaaattcgatgctatttatctgttatttcctgacactccacagagagtgtcagattgaggctcagacctgagcctgagccctgatcctatcacatgtgtgtttagcatcagcttgtaaatttctacaaaacaaaacaaaacaaaaaaaaagaggctgggattttgataggaattgcattgaatctgcacaccaatttgtggagtattgccatcttccccaccctccccaaaagggttttgccctttcacccaggctggagtaccaggcagcagtcactgcaaccttgacctcctgggctcaagcaatcctctcacctcaccctcccaagtagctagaaccataggcgtgcgcaactgcacctggctaactttttaattttttgtagagacatggtctcatcacgtatcccagactggtctcgaactcctggaatcaagcaatcttcccacctcagcttcccaaaattctgggattatgggcatgagccactgcacctgaccagtattgccatctcaaccatattaagccttccaatgctgaatatgagatgtctttccatttatttaggtctctgatttctttcaatgatgttttgtagttctcattgtagaagtcttacaactaagtattgtattccttttaatgctattctaagtgacactgatctatcgttttcttatgatgtctttgtctagtctttgtatccagacaattctagcctcatggaatgagttgaggagtgttccttcctcttctgtttttggaaaagcttttgaaaggtcggtgttcattcccttgtgtgagtgtaaatatcacctatgtaaagttctgcaggaccctgatgtctccacccttctcatccccttatatctctgtgcaccaaaattaccctttcatctcctactctatagtcacatgctgttagaaaagttgcttttttaaaaaagatgaacttctgcctcagaccgtgctctctatataagaatttacctgttaggccagtcgcggtagctcatgcctgtaatcctagcactttgggaggccgaggcaggcaaatcacctaaagtcaggagttcgagaccagcctggccaacatggtgaaaccccgtctccactaaaaatagaaaaaagtagccaggcgtggtggcgggcacctgtaatcccagctactcaggaggctaagggaggagaattgcttgaacctggaaggcagaggttgcagtgagctgacgtcatgccgttgtactccagcctgggcaacaagagtgaaactccgtctcaaaaatataaaaattaaaaaaaaaagaagaacgtatctgttattcaggagctacttgtaatctgtgcatcccaatacattagttttgtatggagcagaaaactagtaagcctaataattgataccttgtgattttgttttgggtgggtgaagctgtttcatgtttaacatgtatagactgtttttgagaaggattttatcattatatgtttgtgatttacaaactgtgtgcttcagacttgccacttgccagagcccttctccaattggaattgttttttgtttttgagacagtctcactctgtcgccaggctggtgcaccgtggcgtgatctcggctcactgcaacatctgcctctgaggttcaagcaattctcctgcctcagcctcccgaatagctggcactacaggcgcgtgccatcacgcccagctaatttttgtatttttagtctacaacggggtttcaccacgttggccaggatggtctcgatctcttgacctcgttatccacccaccttggcctcccaaagtgctgagattacaggcgtgagccaccgtgcccagccagcttttttgtttttaaaatatattgtttaatcaagatgggatctcactatgttgcccaggcttgtatcaaattcctgggctcgagccatcctcctgcctcagcctcccaaagtgctgggattacaggtgtaagccactgccccagcctagttggaattgttgtttgaggtaacaagcttacttaatcctaaagcaagcataatactttcgtagatgcctctagaaagattcgggaccaatttgtcatttgtacattgggagaaaaggagtggttaaacaaagttttactgacctccagcagaggtatgtcactaaaggaatggaaagtgagcaaacaggagctggagagcaccagagagcccttttgtcagtggatgaggctagaatatggcattaatccttccaagtgctgtgtggggttagacttctcatgaaggataggtttgggtaggttagacttcatgagattttttctgtttttaagttttttgttgtccttgttgacttcatgagatttttaaggtgactaagggaagggtgctaagacatagagttacagattaggtgggaggtggagagggttggggtataaaaagcagtccttgaacatttcaaagttgtcttataccagccctgtatccaatatatcacatcttgttcaaagaagttgattatctaggccttgggcccctgagttaaagaaaaacattacagtatactgattccgtcgactaaaaagtaaaatttataggaagaattgagtacagtccttagaaagaactttaattattttatggggggacataatggtttaatagtttaacctctttttttttttttttttttgagagacagagtctcgctttgtcacccagactggagtgcactggcgcaatctcagctcactgcaacctccgcctccagggttcaagtgattctcctgcctcagcctcccgagtagctgggattacaggcacttgctatcacgcctggttaatttttgtatttttagtagagacggggtttcaccatttggtcaggctggtctcgaactcctgaccttgtgatccactctcagcctcctaaagtgctgggattacaggtgtgagccacaacatccagcctaatagtttaaccatttttaaagttgtgtttttctttttgtaaagatgagtttctattatacagttgaaataatatagaaagttataaacaatatatatatggtgggtagaaagaatggggaagagaaagaaaattgtaagtgggaacatgttatacatgttgtatgaaacctgcctttttccatatgtatgtttgtgataattccaagtaatttacatgcatatgttatcctttttaatggctgtttagtactttgcataggtataccatagttcatttaattgacatacaagataattagattgtttttatttttactatgtttgagaggagtatttctgcacctttacggatttgagtgagcatcacttaacatgtttttatcagagatcttactgtagccgtcagtagtagtgcagtcagtgatttctgttattgcctgtaagctaatttgttagcctaacacttcaatttgctatgatctgaggaactgaaagctaaggcctaaaattttatatgtgctaagtgtcgaataataggtcaaagctgcattcttccacaagtaaagataatatggggcttaacacaattgctttagcaatgtgattttctcccctttttctctacttggtaaggagggcttatacccccactaagcaggcacatgcctgtaatcccagctactcaggaggctgaggcaggagaatcgcttgaacctgagaggcagaggttgcattgagctgagattgtgccattgcactccagcctgggcaacaagagtgaaactcaaaaaaaaaaaaaaaaaaaaagaaagaaagcaagcaagaaagaaagaaggaaggaaggaaagaaagagagagaaagaaagaaaagtaaatctgtggatattgtacaaaagattgttttatgattttttaattttttaacataacttttattgacttgtatttgtatttttatcaaacatacttcatttgtttatttatttattttgagatgaaatctcactctgtcacccaggctggagtgcagtggtgggatcttggctcactgcaacccccgccttccaggttcaagcaattctcctgcctcagcctcccacgtaactgggattacaggcatgagctaccatgcccaactaatttttttattattagtagagatggagtttcaccatgttggccaggctggtctcaaactcctgacctcaggtgctccacctgcctcagcctcccaaagtgttagtattataggcatgagccaccgcacccagcctcaaacatactttagacaatttttcacctcagcactattgacattttaggctatgtaattctttgttatgggggctctctctgccttgtaggatgtttagtaatatccctggcctctacatattagatgtcaggaagacccctcagttataacaatgacaaatatattcagattgccaaatgtcccctgtggagcaaattcatcccttgttgtgaactgtgatccagagagccaaatagtgatacaaggtttattgttcacaatagctcgtcccctccaatccagacatctgcctcaccatattccactccccagaggcaaccactttcaacaatcttaaatgtttcatttttattctatttaaagcctttgctcatttttaaattgggttttgtccacattattgagtggtaagagttctttatatactccacagccagttgtggtagtataggcctatggtcccagctactcagaaggctgaggcaggaggataacttgagcccagaaggtcaacactagtctaggcaacatagcatgaccctgtctctaaatgagtctttgaagtatatatattctaggtaattgacctttatcatgtatataatttgtaaatatttcctctcaatctattagttgtcattgcgctttcttgatagtctcctttttaatcttgagaaagcataatttatttttcctctggttggtgtgctttaggttgtatgtaagaaaccattgcctaatccatagtcatgcagatacatccctatctttttttttttttttttttgagatggtctcgctctgtcgtccagattggagtgcagtggtgtgatctcatggctcattgataactgcagcctctacctcctaggctcaagcaatcctcccccttcagcctcccaagtagctgggactatagcaccagctatagtcagcctcccaggtagctgggaatatggcaccaggactatagcacataccaccactaagcacagctaatttctgtattttttggagagacaaggtctcaccatgttgcccaggccagtcttgaactcccaggctcaaacaatcctcccacctcagcctcccaaagtgcaggattacaggtgtgagccactgtgcctggcctagagagatttttttaagaaatagtgaccaaaaatatcccacatttgatgggaattgtgaatctacacattgaagatgctcaacaaattcaaagcaggataaactcaaagagatccacactgacacacattataatcaaattgtagaaagctaaagacagaaaagcagcaagagataagtgattcatcctgtacaagggatcttcagtaagactaacagttgcttatcagaaatcacggagtatagaaggcagtggtggtgtgctgggcatggtggcatgtacctgtagtcccagctgactgaggctgagacaggagaattgcttgagcctgggaggtggaagttgcagtgagctgagatggcgccattgcactccagcctgggcgacagagcaagactccatctcaaaaaaaaaaaaaaaaaaacagggttggggaagctcagcatggtggctcatgcctgtaacttcagcacttttggagactgaagtgggatcacctgaggccaggagtccacaaccagcctgggcgacataaggagaccccatctctacaaaataaaaataattagccagacaaggtggctctggcctgtggtcctagctactcaggaggctgagacaggaggattgcttgcagccagcagtttaagactagcctggacaacatagtgagaccccgtctctacaaaatataaattaaaaaaattagctgggcatggtggtgtgcatctgtagttccaactactcatgaggctgagacaggaggatcgtttgagaccagaagttggaggttacggtgaggtatgatcataccactgcactccagcctggttgacagagcaagaacctgtcactaaaaaaataataaatgaataaaaatataagaatgcttggcctggtctgggcgtggtggctcacgcctgtaatcccagcactttgggaggccgaggcgggtggatcacctgaggtcgggagtttgagaccagcctggccaacatggagaaaccctgtctctactaaaaaaatacaaaattagccaggcatggtggcacatgcctgtaatcccagctactcgggaggctgaggcaggagaattgcttgaacctgggaggcagaggttgcagtaagccgaggtcacacccgattgcactccagcctgggcaaaaagagggaaactccacctcaaaaaaaaaaaaaaagaaaaagaatgcttggctgggcacagtggctcatgcctgtaatccctgcactttgggagtccgaggcaggtggatcacctgaggtcaggagttcgagaccagcctggccaatatggtgaaaccccatctctactaaaaatacaaaaatttgctgtgtgtgatggcacgtgcctgtaatcccagctacttgggaggctcaggcaggagaatcacttgaacccagaaggcagagtttgcagtgagcagagattgcgccactgcactgcagcctgggcaacagagcaagactcgggctaaaaaaaaaagctgaagtgagtccttcaggctaaaatgaaaagatacaagataataactcagagctatatgaaaaaataaaaatcactggtaaaggcaactatatagctaaatataaaagctagtattattgtattttgggtatgttattcctctttctcctttatgatttaaaaacatgcatgaaataatatgcatctatgttaataggaactaattgtttaaagacataatttgtaacaatatagctaggggacagagaaaggagcagagttaatgtatgctattgaagctgagttggtatcagtctgaactagacttagaactcagcatgttaactgaaatcttcatagtatccactaaaaacaaaactttaaaaatatacagaaaaggaactaagaaaggatcaaaatattacaggataaatcattaaccaaacacaaaagaaggtactgaggagcaaaacactttatgtagaaactaaacagcaggatgacataagtaagttctttggtgtgtgggtttttctgtttttcttttttggggtttctttgagacagagtcttgctctgtaactcaggctggagtgcagtgtttcattctcagctcactgcagcctttgcctcccaggttcaagtgattctcagcctcctgagtagctgggattgcaggcgcccaccaccagacccagctaattttttgtatttttagtagagatgaggtttcactacattggccaggctagtctcgagctcctggcctctagtgatccacccgcctcggcctcccaaagtgctgggtacagccatgagccactgcatccagcctgtttttggttttttttgagacagggtctggctctgttgcccaggctggagtgcagtggcacaatcacggctcactacaaccttgacctccgcaggctcagctgatcctcccacctcagcctcctgagtagctggaactacaggtgtgcaccaccatgcccagcttatttttctattttttgtagagacaggagtcttgctatgtcgcccagcctggtctcaaactcctgggctcaagcaatctgcccacctcagcatcccaaagtgataggattacaggcgtgagtccaaccataagtaagtttctgttttttgtttttgagtcaatctcactctgtcccccaggctgaagagcagtggtgcgatcatggctcactgcagcctcacctccaggcgggagccaccgtgcccggtcaagtaacttttctgtttcagtaatcactttcaatgtaaataatctcatcaatggaaagatcggcagaatcaatttttttaataatgtaatacataatccaaatatgcaactcacaaaatactcactgtagacccaaagacacaaatttgttgaaactgaaaagatggaaagagataatccatgcaaatagtaaccaaaagagagccagggtggctatactaataataccacacaaaatagattttaagccaaaaactgttacagaaaaacattttatgttcgtaagagagtcaaatcacaagaagatgtaacaattataaacacatatgaaccaaaaaaaaaaagggctccaaaatgcacaaagcaaactaataaaattgaaggaagaaacaattttacaatgatggagacctcaatgcagtggctctatcacagctcaccgcaatctctgcctcccagactcaagcaattctccagcctcagcctccccagtagctggaactataggcacacagcaccacacccagccaatttgtgtatttttttgtggagacggggtctcaccatattgcccaggctggtctcaaatgcccaagctcaagcaattcacccacctcagcctcccaaagtgctgggattacaggcctgacctactgcgcccagtcaacaccccaccttcaacagtaaatagaacatctagacaaaatcaataaggaactagaggaattgaacaacacactaaaccaactagacctaacagacatatagaaagctctccatctaacaagtgcagaatatatattcctctcaagtgcatatggaacattccccatgataaatcatatgttaggtcacaaaacaattctcaatacattttaaaaggtcaaaattatatgaagggccacatgtgttggctcacagctgtaatcccagcacttagtgaggctgagacaggcggatcacttgaccccagaagttcaagaccaggctgggcaacatggtaaaaccctgtctctacgaaaaaaaaattttaaaattagctgggtgtagtggtggtgaatacctgtagccccagctactcaggaggctgaggcaggaggatggcttcagcttgggaggcagaggctgcagtgacccgagatcataccactacactccagcctgcaggacagagcaggacctgtctcaaaaaaaaaaacaaaaaaaaaaaaacaaaaacaaaacaaacaaaaaaaaacaggccaggcttggtggctcatgcctgtaatcccagcattttaggaggccgacgcaggtggatgacctgtggtcaggagctcaagaccagcctgaccaacatggcaaaaccccatctctactaaaaatacaaaaaattagctggaaggggaggcaggcacctgtaaccccagctacttgggaggctgagccaggataatctcttgaatctgggagacagaggtttcagtgaggcgagatcacgccactgcactcaaccttgagcaacagagtgaggctctgtctcaaaacaaacaaacaaaaaaattatacaaaaaaaaaaagtgaactgcatgttgctgcacagtctaccatagcacaaatgtcaattgcttcttggctttcctggggtgatgggaggtctgaacctaacacagtctcacctgatccttcacaggagtcacgtagcctttctctctccagtccacagatgtggggatctcaagaagcaggcgttcctggaactgtttccccttcctgtgcttctggtattgaaaaccattcatcacctgcctgaattcttcagtggtcttcaaagaaaagtaaataaaatgttaagaagcaagagattaatttggtaaagaactgaggaggggaagcacagagctgggcagcccacagcatacttaccatgtctccaaaggcgttcatggccattgtgaagctgtgtttcccttggctgtattcctgattgtgctgctcagtcatcttcatgttctctcacactgctctcctccatccttcttcattctaaaggcaaacatgtaactgatgttcttcatttctttttttttttgagacggagtctcgctctgtcacccaggctggagtgcagtggcacgatctcagctcactgcaagctctgcctcctgggttcatgccattctcctgccccagtctcccgagtagctggaactacaggcgcctgccaccatgctaactttttgtatttttttttagtagagacggggtttcaccgtgttagccaggatggtctcaatctcctgactttgtgatccgcctgcctcggcctcccaaagtgctggtattacaggcgtgagccaccgtgccctgccgatgctatttatttctaattaaaacccaacatgtgctaaccaagtgaatcttcagacagagatgtaagagtaaccatggccagggaaggcttgacacttctaggagatgttttccaagctgagacacaacaagggtgtatgcccatatcgtgctcataatcagtgctattaagttattgcgttagcttattggtaggagccagcctctagaagccactctctggccatatgatcccaatagcaatgcccatctctctggggttcccctggacagtttcagatgccaccaaccatgtcatataatctcttgtgctttgccttccacttggtccattgtgcgtctaaactgtggtcacgtgttagagcagctgaggcaattcccaggcaaaaggcagccaggaggagtgaaggattcatgtttcaaaaatctaggaagggaaaagaaatgaggatctgattagaccgatcctaaaaagccattttactaccccctgagaaactagggccaccatggtagaataaaaatatttaaattattcttccaagcatttacctaaggactgtggaagaggccaaggatgtggctggagaaaaacagggcaagtggaggtattggagggacccaccaaaatgaaaagcagcctgtccagagctgtaggagttgaaacagttttctgggatgatgatgacaggctatgaaaaggacaggaaggtacctgatgggcgagaagcttaaggcaacaaccgggaaactaggaaaccgttggcccaggttttgtaccaattgtgctgaggtcatccaggcaaaacctcaagaatgaagacatctaatttcaagaagggacaaagggatccccaataattgggaagtcacatcacaccttgttcttggctaatacacaacagaaggtgaagtatgttttccaaatgccccttgtaatgaaacagttattgaatgtcttcccaggacaaactgggaaggagagcacccatctaccgccgttcccgcagtcctgcagtcctgcaggtgggccagtcctgccaacactccagctcccctcacagagcataaactgaatcaggtggccgaaccaccggaagccagagtccccagtgtccgcgcccacacaggggtgggtaggcagcttcccaggctttgggctggggacccaggccaggtctcctggctcttgctcccgccctccgctcatgctcactgtggccccaggacgtgggcgatgttgcagggagcaaggggcgcctctgcctgatttgccggggtcgagcctccctgtcccacccccaccggccctgggaatactgcggcctggcactccggaaaatccctcactcacagagctgaaggacttgctgggtccctggtggcccctgtccaatcttagcccactggggtctcagctgctgtagccacaggtggacaggcacagtgggcaggtgctgggtccaggagtctcctgtcgcctaaggccgcccgaaagcagctaattgacctctaaagcccctagacgcccctgcccccttgccgcccaggcaggcccgcccccaccacttgcccgctctgcgattggctgcgccagccgctgggcggggccttccggcgtgctgactcctggcatgtggagcagctcagtccccttgcctcagtggaaccgggggaggggagctgggggctacgaagagaagggtcggaggtctccctggagggttcggatcaactaagtaccctatttaatgccctgggcgggtggtttatgaaaagaaatttacaggagccctgtgtgcattttcagtttaaccctgcttttcccttaggcctagaatttttgattaaaatctcctgcagggcagagagccagaggactctaatccagtggttcctgtttagtccacagcaaaggtgcggctggctggaagaacgcacagcctgcaagcagaagccttacctcccaattaagggtgtagaagaatctgggcgtgttgctggtggctcatgcctgtaatcccagcactttgggaggctgaggcaggcagatcccttgagcccagtagttcgagaacagcgtgggcaccctggcgaaaccccttctctactaaaaatacaaaaattagccgagtgtggtggcccgcgcctgtggtcccagctagtcgggaggctgaggcaccagcatcgcccagcccggaaggttgaggctatagtgagccgagatcgcaccactgcactccagcctgggcgaaaggagaccctgtctcaaagacaaaaaaacaactggtaggaaaacgcaccctcaaaacacatgatgagatggtcgagaccagaccctaggagggtgggtactggctgggtgggtatccagagaccatgggcgtttcataatgcattgtttcccatctcctccactcagcgactcttcttcccctgaagtcttgcattaagtaagtgaatgaatcaatcatcaagttaatgaagctctgactttgtacttgttgtcctttgcttggtacagttgggcactgccttagaaacaatctccaggtaattttcccaactgcttttgtgaggcccagttttccattttaaaatctaagattacctcagtaatcttgcttttacagcaaatgggcatggagcctgacagatatatttaaactaagttatggacaagctgcctggtgcattaggtagcataggagctaaccttgtgggacatctccccatattcgtaatattcacccctacatctataatcaataaatgcttgtttggaggccatagaaactcttcctgagatctgacctgtgtcttctgctatctgcctgatttctccccatagaacaggaaaacactgtgtaggagatattgtgaatagaaatatgaatataggccgggagtggtggctcacacctgtaatcccagcactttgggaggccaaggcgggtggatcacctgaggtcaggagtttgagaccagcctggccaacatggcgaaaccccgtctctactaaaaatacaaaaattagccacgcatggtggcaggcacctgtaatgctagctactcaggaggctgaggtaggagaattgcttgaacccagggaggcagaagttgcagtgagtgagatggcaccactgcactccagcctgggcaacagagtgagactctgtctcaaaaaaaaaaaaaaaataaattacaaaaattagccaggcatggtggtgggcgcctgtaatcccagctactcaggagcctgaggcagggacaacggctcaaacctgggaggcagaggttgcagtgaaccgagattgcaccactgcactccagcctgagagacatagcgagactccatctcaaaaaaaaaaaaaaaaagaatataaataggaaatacagtgattcaaataagcaattgttagttcctcagatcagaactgtgagttctatactagactcttacatgttatttcttctggtatcttagcaatgattctgaataaagatcagactccttagtcggcaggtgggacagttctcaataacagaagctgggttctcaggggatcccgtggatatgaggatgaaggttagaagcacttgggaccatacctgcaggtctgatttgaggacaatgagaccaagacaggaaggcagcacctgctgaggggctgggggtgggagaagggaggaaacgggacacaagaaaataagtataaaccaccagactgcagtcagtgatcaacaaaattcccaagtttatattgagaagatttccctggtttggggttttgaagagattatataagggattcgggttgcttgatttttttcattctttttcttttaacttggtctcaatttttttgtaaaaaaaaaaaaaaagaatgtcttatgtgcgcctttagaactggtgaatgaatgaacctccctttttaaataactgagattgtcactgaagcactgtcatccgatttaggcttaaaaatctgacactgaatttatcctagatgataaagtgcaagtctcttgtctcctagaaatgatcaggcaaggaaacacccaggaggcccagggcaaaatgccctcctggaagctggtggggtaggaagatgctgaggcccagtatggtccctggagcatgcattctgtgtggtgacagaaattgtttgcttgaccgtacattggtcaggcttctgaaccttctgctaaacccatctgtgcactttttgtaaaattcagttttaggaaattaccctgctaagtcagtttagctggcaggaatccccgtccaccatatactgatcagggtcctcatcccccaccatcccgcagctgatgtcagataaccttggcctgtgctcagcgagaatctcgttaggtcagtttagccagaatcctcccttacccttcatgttccctcatagtcatttcctatctgctaacccccatcctcctccttgagtataattaccacttccttgtgctggattcagagttgagcacaattgctctctctcactgtaagaactacttgcagtgctcctagacctacatatgtgaacctgtttctttaacagtgactcacctgtctttttctcctttcaacttgacactagctgaggcttatccgcatcaaagtggagggactggccccgggggatcctcagggcttcaccttgatggcctgcaggctcacattccactttttctggtgccttctggctccgagtccagtttgccacacaagtgatggaggttggaaggagggatgaggtgacagaggtgaaggagggtaaattcttttctaagccctacttgcctgacatgcatttaggtttttagaaaggaacctgaccccaccctttattttctatctcccacttccatgactagccttacctgtaaaaatggggcatagaagagcccccatctcctagggcagtgtttttgagcagggggtcactgaacagtagcaccttcatctcttgggaccttgttaggaaattctggacttggggtggttgatcatgcctgtaattccagcactttgggaggccgaggctggcagaacacgaggtcaagagatcaagaccatcctggtcaacatggtgaaatcccgtctctactaaaaatacaaaaattagctgggcacggtggtgtgtgcctgtagtcccagctaatggggggctgaggcaggggaatcacttgaacctgggaggcagaggttgcagtgaaccaagatcatgccattgcactccaacctgggtgacagaggaagactctgtctcaaaaaaaaaaaataaataaaaattcctggaaatggattagcttgctgacaagagttattccattgtgtgtttctacctgcaatacctgaggatgcccattttctcacgatttataaactaactcattttatagatgtaattttcatacatttgggggtatcgttctaacttcattattattacttcaaggtgttattatttccccatcatcatcatggtcattatcataactagttggtgctgacagtagtcaccctgcattgagaactcatgctccaggccctttccacatagacttgatttaattccattcactcctcacaacaatcgtctgaaagaaagaatcactaagccattgtataattgaaacacaagaggcgagtgacttgtgtgcccttgggcaggtaatttaaacactctgtgcccccaagttccaatagataaatgtaaataataatatctttcttacctaatacatggggtcaacagttaaagtactgtacatttgtgaggtatttcatggcacctgtgaattgctcatgtgatgacttagtgtgcttccagtgtcagtgtgctgggaaggagacagaataagaagaagactgaaaagatgccgagtctagtgcagggtatcctggggaaaacacctcctgtttgtccaacagcgattggccacacattgaagacacactacctggctgtgaactggggtgaccctgttgaaatcttgtggaaagcttgagatgctccttagagggtgtttatccctcgagctggcacaaatgcggtttgttgttcagtttttccttctactctgcctctatctggtacaaaatggaattgaagaggatataaaccagcaaggaacaatctgaaatcagaatggtgacaatgggagaaagtaatcttggttcaacccaatgttcacctgaagtctctttattaaagactactaacaggaacgaaattgcataataatcttcctatgataatttcaagttccagaatttctctatggaactttcaaatttcacctctgttaactcatggaattttccctagaatctgcaaattaccgaagtctttggaggtttgatgatcactcactggtcagcggtactacaaaaggattctggggagtttgactcagtggtcagcaaaggctcttccgaatcttcagtctgattctgagattccccggggagaactggagcctttcttaacagctgttgattggaaagaccacctgcttcatcctctattgcaacagaaatagccattgtgaatctccatggggaggcacaatgagttttttctagcatgtgtgactcaggtcattttgttccgtggtttccagttgtggggacttggcaaggtcacaccctcccctgagcctcagtttcatcgctcagaaaatgaggataacaattctacttgcctcataggattgttgtgaagattaaatgagacatgtaaacatttgcttatagtaatttcacaccactttattgtggaatcaaagacagaattcttacagaggtcttggttagttaagaaaacatccattcaaagatttgattcacaggacaccctcactgtctttctctcttttttttttttttttttttttttttttgagacagggtctcacttcattgcccaggctggaatgcagtggtgtgatctcagctcactgcaacctctgcctcccaggctcaagagattctcccacctcagcctccgagtagctgggattacagccatgcactgccactcctgggtaatttttgtatattttgtagagacggggttttgtcatggtgcccaggttggtcttgaactcctgggttcaagcaatccacccgcctcagccacccaaagtactgggattacaggcgtgagtcaccacacctggcccttgcttactttcgtacttcccaagaggcaggttaccaaattggtgaaattaaccataacatcattgtgatgggcaagcagatatattaaaagcaaagatacagcaggttaacattaaattttgctcatcccaggacaaacctggccacaggaggcctttgccagtattctgaaaagtgttgtgaccatctcctttaaagctcagttaaaggtttctggctggactccaggctgcttcaagctctttacttgtctttatcattctttaaggagggacccagacacagtatgcagaggcctgaatcctctagatcattctctctccaccatgagtcctgccgtggggacttttccagctccctttggccttatgagccagaaaatcaggctagagcctaaagagaacagaaatttcagaatcaggcttgttctgcgactgtatgggggagctgaaggacacaatgggctttctatattggagactacccatcatactctctctgcccagggagaaaggacagatgctgtgtgattttgcagtctgtgatttggcttctcattctcgctgctctctacacctcattgtttacttcactcccctgaaaaaaatgctccctaacaggctcagtacccaacttctgggtattgctgcccacatttgccttggttctaccttttcagattgcaggatcctgaggttttgcttggagcagctcagattctccactagatctaagatctcacctagtcctgaggatttccttaaagggaaggggaaagatagatagatagatagatagatagatagatagatagatagatagatagatagatagatagttgctgcctttgctctacagcatctgcttggtgaagaggctcaggatctggatcctggcctctcagctctcaggaaccccattcccccctgacaggggtggcaagttcatcctattattcattaagaaatttgaaaacaatcattcaggaattttaggtcaagagctggaaaaccccaagcctccatcacctgagcaaagggagatactgtgagcacctgcaggatacacccatgttccaccacctgcctgaagaagcctgtggttcttgtcagcttctcaagggtgaagtgcagatccttttctgcttgagcagaagagcagaccaaagagctcattgactcaaggagcatcacggcaactgagctgcacctggaagagaagaatccagggtgtgatccacagccaaggcctgaagcaatggggcccatacttggcctctccagggtgagttgtgacccaagtgctgggctttagcccatgagtggtccctcttgccatttccagtttcctcccaaagagaggccagtgttggtgatttcatttcttataatctccttaggagcacaggttttggtttgtgccttttttggatcaggttccctgcattgcagctgctataattaaaactattaacaacaacacagcaccacagaagcaagttagttgctaatggaatttgctgataatgctgtcttctagagaccactctagtaactggagagccttggtgtagagctgatgataaaacctattcctgcttttgtcagtcatgaggagcatttcctttctagacagaggaactgaaacccacatgccagcccaaatttaccaaaagcagtcactggaatactcatcacaccatcatgtctcatcttatccctttcgttaccttcaaatacggccccgtttcctcaggaccagaactcccttatgtgggcagcaggactaaggcccttgagttacctgtggtgactcctcattaaatggaggaatgtgccagtattttcagcaaaacatgaatctgatgaaacactgactgaactgtctcctagtttcaaaacaaattattaccactcagggcctctatttagggcaatcagagtcagaagtgggaacgcatcttgtcctcctaccttgattaacagtaactctaattgcaggatgatggtcaaatcctctctcctctaatgtgcagttgtgaaggatttaggctccactgctcatgcatttgggtggggcctgaatcactttcagtctagcacaggcgggtcacttcaggccttcccacctccatcagcatccttcaatcctcccctgacatctctcatttatgcttcctattgattcagaggtcccaacccgagtggctaaaagaaacattcattaacctttctacaaagtcatgaataatccatggattacattgaattcatccctactaaaaccatcttcagaaattcagatgtagtaaccttctttctgaatttttttttttttttttttttgagatggagtcttgctctgtcgcccaggctggagtgcagtggcatgatctcagctcactgcaagctccacctcccgggttcacgacattctcctgcctcagcctcccaagtagctgggactacaggcacccgccaccatgcccggctaattttttgtattttgtttagtagagacggggtttcactgtgttagccaggatgatctcgatctcctgacctcatgatccgcccacctcggcctcccaaagtgctgggattacaggcataagctaccgtgcccagccaagtattctatccttaatgaacacatatatgcacattatatctattttttataatatatatatttagaattgaatgtcagagtacatatcagtgttggaggaagagaataaggaggaagcacagaaagtaaaaaggaaaaataggcaccaaaaaagatttggagaatggcagatggccaaggagatgcagttgggaagtgcctcttccatggagaggaacccaaatatctagtaaaccttcacattttaaacagatcttttgagagaaaacactgaaagttgacacagaggtgacacagacaccatggttgaagagggaagaaatgggacagtctgctcagagtcactagacatcaggactggcccatataccctgaacaaacccaaggaaggggtgagtgaaggaaccctgggacactacatacccataatgtacctctgagatcctagttacaggagtttctacgaccctcatagatctttggactggtaggagagctgcctcgagcacatgcagaggcacagtttgaacccacacagagcccagaaggctttgttgtgctgtgcagctgcagcaaaatgcaaccctaggtgcccatccctcaagcctccatttcatactgagtggctaagttcctgctgtccgccaggctgggagtgaaccacgcctggcctgctcacatgcccaagataggccccatcaccagtgctgtgtgattaagttgcatctggtccacatgcccccttgcctgtcaaccccttcccagagctcatgcctggtcacgcctgcaagagggtgtccacagcacagcatccactgcatagcttgagtgttttgttgacagcctgggaaaagctcaccaccctgtccccaagtcacagccagtgcttgaagcttagaggccagaggacaaatccgtgagcccagtcccaactccccaagactcaagtataccacccagggacactgagctgagatttgtaacctaatctcaagtgaaggaggatcctccatagtcagaatgcagagaagggtgtggtatgggttctcatgggggcatgggaactggacacccctccctttgcaagaccagaccatgaagggtatggcctgatggtggtagcttctttcccagggagtgtcctggcacagaatgcctggagcagctcaacaatgtgggagcagatggcttggggaaagcctagttggttgggcttgccgccagggcgagtgtctgtgggagatctgctgggtcaggggagtgtaagctaggcagactccatggttgcctgctgggctgaaaatcatgggctgcagactccatactggtgttgcacccattgtgccactgccctgcctggagatcctctacccttgaaatactgcatcatcagagcaactgcagacataccctaaaacctgctctgactttggtaagcacagtggactggtgggtctctggagagttgtgtgtccctagagatgtaatcctcagtgtggaccatccctaagggaagggggagtgcagcctgccaaagcacaacatgagacaaagaaaatgcggccatggcataagccactgaaaggagcaccaccaaggcccagaaccagacttggagaaggaattatgtctcgcctccatctcccctccccagtgcactgttgcagatgcaacaatagctcttcccataggggcccagaaagcgtgcactgaaagaagttgtttctcatgattctccagtgagggcaagcatgcaccaagaccccacctgccagctcttactcttaagtccatctaccagactgaagtttgagttataccatcatataaaaatacattgctaaaacaagcaacatctgtgaaagccactgcagcaacctatctgtaaccaaggaacatatatggaaacttcaccctctgcaactacagagaaatgaagccaatcaatcacatacaccactgtcatactttcaaagagaataaaaaatataaaagccctgtgatggttaatactgagtgtcaacttgattgtattaaagggtgcaaaatattgttcccgggtgtgtttggagggtgttgccaaaggagattaacatttgagtctggactaggagaggcagaaccaccctcaatctgggtgggcaccatctaatcagctgccagcacggctaggacaaagcaggcaggagaaggcagaagagcagacttgctgagtctcctggctttcatctttatcctgtgctggatgcttccagttcttcagcttttggactcttggacttacaccagtggtttgccaggggctctcaggccttcagccacagactgaaggctgcactgtcagcttccctacttttgaggttttgggactcggactggcttccctgctcctcagcttgcagatggtttattgtgggactttaccttgtgatcgtgtgagtcaatgatccttaataaactccccttcaaatgtacatctatcctattacttcggtacctatagagaactctgactaatacaaaccccatctaaatgaagcaaattcaaaaaagaagtgtcaactcccgcagatggaaaggaataagcacaagaagtctggcaatacacaaagccagagtgttttgtgatctccaaagcctctcactagctccctaggaaaggatcctgaccagatgtaaatgtctgaaatgagacacatagaactcagaagatggatgtcaatgaaagtcaatgagacataagacaaaatagaaatccaatgcaaagaaaccagaaaaacagtccaagatttgaaagacaacatagttatattaagaaagagccaaactgaacttctggaactgaaaaattcactaaataaatttcaaaatatagttgggagacttaaaaacagactaggccaagcagaaggaaacacttcaaagcttgaagactgattcttcaaattaacccagtcatgcaaaaataaagaaaaaatattttttaaaaagacaaagccttcaagaaatatgggattatgtaaagaaaccacttctacaacttattggtattcctgagagaaaagaaagagtaaccaacttggaaaacatatctgaggaaaaaattcaagaaaatattctcaattttgctagagatgttgacatgcatacaccagaaatccagagaacctctgttatacactataaagacagccatccccaagacacatagtcgttagactatccaaggttaacacaaaagaaaaaacaaatctcagacacagctagagaaaagagcaacactacctacaaagggaacccatcagactaacagtggacttctcagaagaaaccttacaatccagcagagattagaggtctatttttagtactctaaaaggaatgacattccagcataaacattcatattcttcaaaactaagcttcataaacgaaggagaaattgagtctttctgagtcaagcaatcggtaagggaatttatcaccactagactagccctgcagaaatgcttaagggagttctaaatgtggacatgaaagaacaatacacagaaaaagcacagttaagtacatagtccacagactctataaagcaactacacaattgagactgcaaagaaactagctaacaaaactatgacaggaacacaatctcacatatcaatgttaaccttgaacataaatggcctaaatcctccgcttaaaagacatacagtggcgaattggaataaaaaaatcagaatcacccatctgctgtcttcaagagacccatctcacaactaatgacactcatgggttcaaagtaaagggatagagaaagattaatcatgcaaatggaaaacataaaagagcaggagtttctattctcatatcagagaaaacagatcttcagccaaaaacagaaacaaggacaaaattgttattgcttaatgacaaagggctcaattcaataagaataattaactatcttaaataaatatgcacccaatattaattggagcatcacgatacataaagaaatcactactagacctaagaggtagacagcccctcagtaataactgggaacttcaacactccactgacagtggtagatagattattgaggcagaaatctaaacaaataaattctggacttaaatttgccacttgaccaattgaacctaatagacatctacagaatactctacccaacaaccacaatatatatatttttttctcatcttcacatggaacatactctaagagtgatcacatatgcagttataaagcaagtgtcaagaaataaaaacaatcaaataatatcaagcatcttcttggaccgcagtagaataaaaataaaaatcaatagcaagaggaactctaaaacacagacactcacacacaaacacacacggaaactaaagaaattactcttgaatgacttttgtttgggtaaacaataaaattaaagcagaaatcaaagaattttttaaacaaatgaaaatagagacacaatgaacaaaaacctctgggatgcaataatagcagtttaaaaaggaaagattatagtgctaaatacctacatcaaaaagatagaaatatctcaaattaacaatctaacattgcacccagagcaagtagtaaaacaagaaaaaaaactacatccaaatatagcataagaaaagaaataacaaaaataagaacaggactgaataaaatcgagactcaaaaatccacacaaaggatcaacaaaatgaaaagttggttctttgaaagtgtaaccaaaattgatagactgcaagcaagattaacaaaaaagaaaagatccaaataagcacaatcagcaataacaaaggcgacattcaatcgagtcccacggagattcaaaagattctcagagactactatgaacatttctatgtgcacaactagataacctagaagaaatgaatacgttcctggaaacacacaacttcccaagattgaaccaggaagaacctgaaacactgaacagaccaacaatgaattacagaatgaattgaataagtaatagaagcctaggactagatgaattcatagctgaattctaccagacatacaaaggggagctcatgccaatcctactgaaactattccaaaaaatcgaggatgagagattctcctctaacttactctacaaaacctatatcatcctgataccaaaatatggcaaatactcacacaaaaaacaaaaccctaggccaatatatctgatgaacatagatgaaaaaatcctcaacaaagtacttgcaaaccacattcagcagcacatcaaaaagataatacaatatcaagtgaactttatacctgggatgtaagagttgttcaaatatatgcaaatcagttaatgtgattcaccacataaacagaatttaaaatgaaaaaaaacataagattatctcaacagatgcaggtaaaacatttgataaaatccaacatgccttcataattaaaaccctcaatagactaggcattcaaagaacatacctaaaataataagaaccatctattgacaaacctagtctacgttatactaaacaggcaaaagttggaagaattcccataagaataagaacaagacaagaatatccactttcaccactcttattcaacttaatactggaagccctagccagaatgatcagacaaaagcaagaaacaaaaggcatccaaataggaaaagaggaaattaaattttatttcttcactgatgataggattctatacctagaaaaccctaatgattctgaccaaagactcctagagttgattaaaaatttcagtaaagttttaagataagaaatcaatatacaaaaagcagtagtatttctatacaatgcaatattcaaactgagaaccaaatcaagaacacaatcccatttacaagagccacaggaaaaaaaaaaaaaaagaaatacttaggaatacctctatccaaggaggtaaaagatctctttaagtagaactacaaaacactgctgaatgaaatcatagatgacacaaacaaatggaaaaatattacatgcttatggattggaagaatcaacatcattaaaatgtctttactgcccaaagcaatctacaaattcaatgcagttcctatcaaactgccaaagttatttttacacagaattagaaaatcaattctaaaatttgtatttaactaaaaaagagcctgaatagccaaagcaatcttaagctaaaagaacaaaggcaggggcaacacattacctgacttcaaactatactacaaggctacaataaccaaaatagcatggtttgggtacaaaaacagacacatagaccaatggaacaaaatagagaatccagaaatgaagtcccatacctacaaccaactgatctttaacaaaattgataaaaatacaatggggcaaggataccctattcaattaatggtgctgggaaaactggctaaccatattcagaagaatgaaattagactcctgtctctcaccatataaaaaaattaactcaagattgattaaagacttaaatgtaaaactttagactataagaagcctagaattagacctaagaagctcttttggatattggcctatgcaaagaatttatgactaagtactaaaacacaaaagcaacaaaaacaaaagttgacaagtgagaccaaattaaactaaagagcttctgcacacttgcatgttatattgcaaatatgaaatagcaaagacatggaatcaacattggtttccaacaatggtggattggataaagaaactatgatgcatatacaccatggaatactatgtagccagaagaaagaatgaaatcctttcctttgcagtaacatagatgtgcctggatgccatcatcctaaatgaattaagatgtaaacagaaaaccaaatactgcatgtcctcacttataggtgagagctaaactttgggtacacaggagcaaaaggatggaaataacagacactggggactccaaaacaggggaaggaaggaaggcaaggtttgaaaagctacttattgggtactatgtttactattcagataatatgttcaatagaagcccaaacctcagcatcatgcaatatattcatgtaacaaatgtacacatgcatgcttaatctaaaataaatattaaataatcaaataaaatgatttccatgaataaaacggtagatatgattatgtggaaaatgctttactatttattatgtggtgaataatttaataatatttaataaatacatgaatgaaaaatagctacaactgtgtgttaggatttcaataattttttatttcattcctataacttttatgtattattatatacataataatatatagttaataataacaaaaacaacatggtattgaaataatttccacccagaaggaggatcaacatatttaagtgactacactactcgagataaaaatcatttatcaaacagatcaaagtcatttacctgctttcctttttataggtcctaggaacacacgtgccatagacaataaaacatcacttcccccatcccactaccttggactttatttaacatctttgggtagaacagaaactgttgataaggtgagttttgttttatagacaagagaggaaaatggatactttttgtggtctgggccttagaaacagactaagatcttttttttttcttttttgctttttttactagcataaaatattaattggcaaaacaccgaatacaagcttcactatcataaaatcaaaacatttaagcaatattccaaaaaagatttgacaaaaactagtcaccaagagtacaaaaattacacatcaacacaaagcataaaaaatgtgaactttcaaattaaacagtcaaaaacatgtacctgcgtgatcacctccacaccttgactgccttcgtctgcagcacgctgctggtaaaggctgggtggctgcaccgtcgtcccctaacccaacattgctttcatctgggaaaattcgcttgatagccaattaagccatggaggctattacatttacacggggctacgcacaatctcaggggacgctcaaacagcagttcgttcctcacacgcactgttgggtgcaaagggcacctggagagtgagggagacctgggcgctttcctgcggggccttggccacgcggccgtcgcccgcaccctgtcccttgcctggcaggggacacaatatttgtacagattatggtataatttgaatgattttctaatctacttatcttaatttatatagtttatttaaatgtcaaggcagagaaatacattgatcatgttaaggtcacgtgatgtggtggcgcagtaatgacttcctgaggaaacagaaatcggatgttttgtgatttagctatgtgcactaaacttattttccatgttttgagagcacattaaacattcacgtacaatgtgggaataggctggctcgtaaccaaaacgtccaacccaatgccaccctttgaatcgctgtgaacaccgtcctattgcggttcagagaaaacaagcaaggctgcgaagccccggggttcaggcagctgcagcgcttgggccaaggtagctccgctctctggtctgaagccacgtggccccaccccggggcggcctggcttttttatagtgcttattgctgtgtttggcatgccattcaacccatcgggatgttggatagtgacttgagagcaatccctagatttgccctgtcgggatgttgcatactgagttcggaataagccctgctcaactgaggcactatcactaggaggaggcactgattcccgcctttcaatgctatctattggtgaaagaggagttggatggcatctgggaaattagtatcacttctactttttcttcttttcttttaaaggttaaaaataccttgtattagttaatactgctataaaatatgaatatccaaatctctgtggctcagtaaaatagatttttttttcactcagagaaagttcaggttcacccttagtaacccaggctgacagagactcttccattttctatacatagcttccccaattgcccagagaagagtggaaagatttgataggtgactgtacacaagaataagaacttagtacctagtcactaatttactcgttgaataaacatttatggagcttaacatattaatcactgggcagacgctgggacacaagaaaaatctttaagatatgtcactgcttattaccaataatgttctagtgagtaacaagagttaataacacgactaattatagtattgtaaatataattacagttccaataagacatacacacacacagaacgattttgtctggttgttgaggaaatctttattgatttaagatatcttttgatgaacaggatttttcaataactatcagaaaaagaatgtctatgacttatttttaaaaactattttcttatctgccttgcatatctgacactttcatctcctatcttccttgaatacaatatagaacctgacatttctttcctttcaaagatccttagagcatttcctacatttaatctgaatgtctttctcagtaatttttcccatacaagcaattatggctacattttcttaatataatcatgaaaaggtgagcaaaactgaaaatttaatttggagaatagatacgaaacattcaattaattcaagttgttgttaggctgcatatgttcagctttcagtgaagatgaacaaatgatgataaatgagaaactgaaagaaaacaaaccaataggtgttttttaagaaacaatattattaaagtgcatgtgttttctactgaatgaaagcaacatagaccttttcctcacattggtagttagtaagatgtataaaaacaactttgtaaagaacaattaatacaggttaatgaatcattgtgaaaaggggataacacactttattgtagcaatgatctgcaaggtgttaaatgttaaaaaagatgaagaacaattgagtagttatttgatcacagtgtttattaaattgcttttcctgtatctggcaagctttacagaaatgtcttcaacagaataactgtgttaaaagccaaatgaaatgcattttgaaatatgattcttcacttggtgtgcaggtataatctcaggtgtaattcagacaagagacaaattcaattttaaagttccatttgttacaatttgatgattgtgattaaagaaccataaaaattttatctttgacatttcattttttcctcacaaaagtattctactgcaattttcttagttttctttcctcttaactgtggtgttacctataaatgctggatttctctgttttacgtgcaacaaatctacaatcaactatttctggaacgccacttcattttaacaacaaggacccataaatattttaaaaattcaaaatgttatatataaaatgttaaatgatacacataatacatttctaagtagtaattatgattatgcccataattatacccataatttaaaaatatgttacctgaagtaaattattatacgttttatgttggaagtgttcatttatctttgatctctgttaacacattgtactatgtggtaataatataaactgccttactggatagtgatgtatctttggtttcatattgttactggactaatattccaacactatagatagtgaaatttaacattgaaacaatttgataatgccatcaatgaatccagtttttaagagtgggatccattttctaaaattgagtatatagatacttcatgagatatcttatcatgcatcctaaaccaaaccaacctcttcccctgactgtcttacagtgtattattattattttatccaccacagcaactagtacatttttcagaacctagtagatattcagtcattgtctatggaatacatgaacacattctgaatttggacagtcatcattcttggtgttttaaaacaaacacttcctgaattgcatccactattttctaagaagccctaggaattcattgaaggagggtatgggtaagttgtgggtgaaactgtaaagatgtaggtcctcctcccaaaacttcttcagcgtatcttcattgctgtttgtttgcttgcttgcttgcttattttaaaagagatctagatatagtctaataagaattgtataaatgtgatgttccacaatgattctaacttacatggtgcaaaataataaaatattacattctacctgtttgtagaaaaccatggatactataaaggatctagattttctctctcctttccttctaagatttattcactcagcaaagacttacctggtgactacttagtgctagacactgttttagatacttgggctataacagtgaaaagaacagtaattgaattaatgaaaagttcattttaattagctgtatggtaaaataggaaactaacaaaaataaaatataacatgtcaaatggcaatgactgctctgagaaaaataaaggagaataagaggttctaaattattatatacggccaatattaccaacatattatagaaagaaatgagttcataatgtttatcagagaattccatgaaaatcgctaaatttttctagaaagccaggcactgataagagaataaacaaacagataactgattttaatttgatcttctcttacaggtgcagctatgatctgccattgtatataatataaaattaaaaattgtttatatttcattcacgttagcatataatgttcttacttttttttttttttgagacggagtcttgctctgtcacctaggttgaagcacagtggcacggtctcagctcactacaacctccacttcccgggttcaagtgattctcctgctccagcctcccaagtagctgggactacaggcaggcaccaccaagcctggctaatttttgtattttattagagacggggtttcaccaaattggccaggctggttttgaactcctgacctcagatgatctgcctgtgcctcggactccaatagtgctgggattacaggcgtgagccacagtgcccggccaacgtttttacatttaaatatcagacatctatcatattcctttctccctactacaaacattgtatgcttttcaataggcataagattttgttttcactcaggttggattcaacaggtattatttagcagttcattgcatctatccatttacccaatagaggaagtatacaagatacaaatgaataaagtgtaataattcttatactatttgcccttatgtcatgtaactgctccatgtttgtattccgaaaacctaactgggagggaaaactcagaaaaatagaataaaaagtattatatatctcatacatcctcatttttgaatattctaggggtacagatcagtataaataaaatactctggtaagtgaccaccacatcatctgtttgtcattcttagacccagagtataccattcttttaagaaagaaaacttgctactgtacctgctacccagtaacatatatatcacatatcatatatatatcataacatatatatcatatatcatatatacacatatcatatatctcatatatataacatatttgctactggttaggagtaacactcagaaaattatacttaataatgtagtacaattaggtataaattcacttagtatttttaaattttacgtatattcctatttatatgaatcgtcatttaaaatcacatctactgatcctgatagcattaaaggcataagaggtactgaggatattaatttaattttgtttacagctatgcacagatatttttagttcactgagatttaatccagtagtctattatttgattaattgtacagctatcaaatcattcaggactcccactgtttcaacaacgagagtggaaaaatattttttcatttatgtttatatgcagctatttgtagtctaaattaatatcctagcaattgatggtgaaattaaaattatttctgtcagatgtggtactttgatgacagtggataagcatgggaataaaagaaagttttgaggaagaggggacagtttttgtttacttaatgattattccaaagatgttaagtaaacattctatagaatgcaacatatagtggaatacagcattgaaacaatttaataatgtagtcaatgaatccagtttttagaaatgggatccattttctaaaactgagcatacagatacttcatgagatgctttatcactcatcctaaaccaaaccaactccttcccttgactgtcttgcagtgcatagggcatctctacactctaggaaaggaattatcaatctgtttatatgccacttataaaatcatacttaatgtacgattaggcataaatttacttgcatttttaaattttgtaaaatgttaacggaaagtgttcttgaaaaacatttctgagaattccaaaaaatgaacaaattttaatacataagggacaatatctttctagtgaattgattatcagagtgtaatgtggtatgttctgattatgttacataatattctgattagcagaaaattttgaataagtgaatttagcaaaatgtttagaggtcaagaaaactgttttagactgactatgttttctgacccaaatgtaagaaagaacccaataaaaagaggcagccagataatgctgttgtttgcaaacttaaacagaagcttgcatgtaatttatgactcaaagaaaaataaaaatagaagttatactttatttagaacttaatgacagtgaaaaattgcacataaaaaggaagactgttgaatacagcaaaagctggaattatataagaaatataaacataaacacacaaaataagtgtaaattataatgaagtaaaaatatatcaaagagaaagaaggaagcagtacaataaaaaataaagttgattctttaaaaaccatagttaaatagacaaatttccagccagattgtttaccaagtaaagagaaaaagaaggagatagatcaaaagacacaagatgatgatgaaaagagggtcagcacttataaacatagtagaaatttaagccataatgagcacaagaaagcattatcaacttacttttgaatatataaaatagacacttaaaaaactgaacaaaaatgacttactagttttaaaagaaaaaaaaaacatcaaacatctatccttccaaaagtatagacttcaaaagtatagtcccagaagggtgaacataaaccacactttaagcaagaactctcagttataaccagatgggtgaacataaaccacactttaagcaagaactctcagttataaccagatgggtgaacataaaccacactttaagcaagaactctcagttataaccagatgggtgaacataaaccacactttaagcaagaactctcagttataaccacatgggtgaacataaaccacactttaagcaagaactctcagttataaccagatgggtgaacataaaccacactttaagcaagaactctcagttataaccagatgggtgaacataaaccacactttaagcaagaactctcagttataactgcttgcagttttagaggatcccagccacactcctgaaccagagcttggcactgggtattccctctggaacacccttttatttccttctctaagcaaagacatggaatcaacctaaatgcccatcagtggtctgctggataaagaaaatgtggtatataaacaccatggaatactatgcagacataaaaaaagaacaagatcttgttctttgcagggatgtggatgtagttagagaccattatccttagcaaactaacacaggaacagaagatcaaacactgcatgttctcactcataggtgggagctaaatgatgagaacacacggacacatagagtgggggacaacacacactggggccttttggagggtggagaattggaggagggagaagatacaaaagaataactagtggttactaggcttaatactggggtgatgaaataatctgtacaacaaaccaccatgatacaagtttacctatgtaatgaacctgcacttgtacccctgaacttaaaagttaaaaatgaatgaagcctgtcagaaccacccatttagcagtctaacattttgcctagtattcccaaatccctttgcctagccaacatttttcacagcactttttgtcttcaaactactggcctgaagcaatctggcttagctttctgagtagctggaattgcaggtgtaccagtgtgcccagccacagttttttcaagacctgtttaagacaacaggttagagaaaatcaagataatattttgagggggaagaaggtaaaatcaattaagacagggtgcacagagtacttgaatggtacagataatgtttatcctttgtactaaatggtgtgtatgtgggaattggttatattattttgactgtttgtagtcatattatatacatatgtgtataaataaaaataaaagaaaaaatataagctaaatttatagatatattaattttatttaaatataacaaagatttgccagtattcaaatgtctgcaatgattcttaaaatgcacagaacctgtgtttaggtacagtatcactgttcatccagccttcattcactcgaatctactcttacctaaaatttgtaccgtaagtaaattacattctgtatgacagaaagcaaattacaatattagaacaacattatggaaaattggcataacattgtacaatcatccattactttattatttatcattttgcaaatttttattatattagtaaaaaagtctaactgtacttaatagctaatacatatattatttgatatttttaaagaccattattaaaataataataatttgggggtgagaaggcctattgaaaaatgaccaacgtggaaatcataaataagtttgatgcaacaaatatttgtgagtcttatagttaaaaatgtaaaaattcattataaacaaagctaaaagacaataatatgcattgggaaatatttgcaacatttacttcaaaggtggatgtccttaagagaatttttacaaattaataaacatttaaaaaggtgaggagtggcaatagctatgagagacaatttacaaaaacataaaaaatatgaaaactgtttaatctgtaagtacatcaataaaaattttattattgtagttattttatctattaaattaggaaaggtcaatacaattggtaatcttccaagtaaatataggagagaaggtctttctcatacatttataagaatattattttgttagaatgcaattaaataaacacttggtaaaaatccatatcctttgtccaaacaatttaagttctagacctctagaatccacatgtacatatacatatatacatacatatacacacacacattcacacctatatattaacaactcaaatccaactccaactcttttgtaagtagtattttgtccaacaaataaatttatctcaaattcttcttgacttttctccattatagagccagcaattctacgtgtaactctacctctaattcctttatttgcatttatttctgctttcaaacccttatatgaggcaagtgggattaatttatttcattaccttaactagattcatcgctttactttgtcaaactctgattgatttgctcaactcaatcttatgtgttcaagaacttaatgtggattcctgttccaccttatgaaagtcttttccaaaaacttgctaaattcttgactcaagacattgcagtcagtaatgcatttctctcctcaaatacaatggaactgtgttctaataaatactcttcaacaatgtgcagttatttctccacaactatcaattccccttaaagcagaattttactaaaaatggctttatccttctggggataatcagtaaaatggcaattggtgggtgaattaaaaatatactaaaagcagatggcagaacatgagtgcagatttttactacaaagcttaggaaaagcaaaaggaacttgaatagagaaaatgcagaaaagccctcctttggctattaggacggagagagcagaagtatgtttagagcttcaaagagtctgactctttgcaactgtttatcttaggactttaaggaagtaaaaggtgcaagtgaaacactctggattataaaatagaatctgacacagaggattcaacccagttaatatgcatgttgcttacatggaaatgctgagaaatttttagcaaatagatagaaaatgacagatggtaggtatatagaaaataattgtaggaaaaaatgtaaaatgaagatttatggtattccttttatattttattttgttaatatgttgcccataatgctttatttcaaagaatgcaaaaccaaaaaagtagttccttcctaacttcccctgcagccttgtcttgtggagcttgtattttacttcatgagaaatgccaaggagatgtcatttaagctgaaacctccagcagaattagccacaatatttgggaaaaagatgtttccagaaaaagaaagagctagtataaatgtccttaggcaagaaagagctcacgatgattgaggaacaacaacaaaaaagattatttcactcaagaaaagtgaattgggagtacagatacaaatgatgaggtctgaatatgattcatggggcaggtcacactagggtgtttgggtatggtctaaatgaatgcgcggcatgagttgctttaaggagaggagtgacatgatttgacaagttcttaagagatccctttgattactctggggagaatagaacataaagtagcagaaatgaaagcaaagggagatagtaggaaataattgcacatttataagcaagaaatgatgttggcttggactctggttatagcaacaaataaagaaaaaaggaaatactgagaagagttgattggatttgctgacattctcaacataaatggaagtcagtatttttttctaataaatataatatgcgtaaatatttttaaatatttaattcttttaccactaatggggcacgagtagacttcagggaacatgccagtacagaaccatataaatgtgatcattggtagagataggaattaataggcatttgaatgtctccctcaacctggaataccacaaataaagctctttgcttttcatgttgcattgttatcataccctatagttttctgccattttcagttacttaatattatgttttgcctcaatagattatagtgctttctcttgttgtgttatatttgcagcaattattagtgaagttttaaacttcaatatcacatctaaaacagagcaaaattgttgcatactattttccattaaaacatgagaccactatgacaaaaaaagctaaacgtgtcatgaaatgacttacattggatgaaagtatatgcaatatattaagaaataatctctgactttatagttttttatttgtagtttttactagaacgtgaaatcaatatgtgaaccctggctggagtttgcatctaaatgtaataaaataaaagaaagtttaatattatcattgaagcattaatgtacattagcgagctggactatataaaataaactttattatatttagcatttgatttttatttatgtatattataaaatgaatatagtttatattataataaaaataaaagaagtagtatgttaactaattagtataagatgcctacaaactacatatctgcctaaatttttgacccatgaaacttcaatgatttgtgttaatgttaaggcctacatttatttatatatatatataattaggggaggaattgttaattctttcattttaaaaattttaactttgcagacaaagttgactatacctgtggcagaacactgcaacagctataaataaataaataaataaataaataaataaataaataacttttattttctgtggagctcccagaattatgaattattctgtagattgagatttgccaaggtccttttcttagagttgcaagagcataggagaaagtcaagggaaataataagcagcacttgatttcctttaccacagtggatgggcttctaaaaccaaattacctgactataaatccagatctatcttctgcaggctatgtgattgtggatgttacctcttctgtgcttcaatttcctcatctgtaaaatggaattatagcctaccctattttgtagtatagtgaggataaatagaatgaatgtatgtagttcttagaatagagcatggcacgtgataagtggtcaataaaatattgtttactactagttatgtaacagtcacttcacacataataatgatttaataaaggaataagaagaatgtagagcacagcttctcaacattggcactatgacattttgggtcagacaattatttaatgcagagggggctataggatgcttagcagtgtctctggccagtagtgtacctcctcctctccaagttttgacaatcacaaaggcttctagacattgacaactatcccctgaaaagtaaaattgtccctgcttgagaacacaaatataaagtaaccactcaaagattacattactaattttaattgaatttgaccagcattatgaaataagcataagcttaagtttctacccttgattttgtcattgtcagttagggcagcagagaactccaattctgaaaattctgaacatgtgctaataccctataatataatcaaaactttcatttttgaattgtatttcttaaaaattagaaaatttattaagcagcaacatggaataattaaccacaaaaatgttgaacataaatctcatttgcctaagttctcttttgaagtcctgtttcactatataagtattatgtgttttgtttcacagctagataacagccagttttttctctgagcctaaggttgctcctcaaatttatggtggcttatagctcttctaagtttctataaaacttcagcaacctgcagcaggttgaaatttattgatattgagttattcaccaggtcatattacaaagtcagggactgactcacccaaaccagatgctccccctgccaccagatcactaggagatattgcaatcatttcccctggctactaaattagcaaaaattctcagggagagagaagggcaagatggcacagtttaatacttactattattcttttattctttatcatcattccctttgaatggattaagaatctgacataaatataacttgctaaagaaagggtgttaggtgagagggaagtcatattggtctaagaaaagtcttagagaaatatttgaaaagaggtagagagaagggttggattggagtgggtgggtggggaatcacactaaggagatggatcattcataatttctttagacatggtgaggcagccacaggagtctgaacttgttgaaaccctagtctgaagccaataaaagtgctcaataaggtcacactttgatcttctctgcctaaagcagttattcaccctatctttgggagaggaaacatctacaaacctttgttctctttgttagcagagggatgacatgaatttgggaaaaacgtttgagagacaaaatgagatttagctcgagcaagtgatcgacttgtgctgggttgcaaatggactttttcaacaggcaggttgaaactgtgcttcagcaattaggataccagatataaacatccatgcacagaattggaaaggttcagctttcatggttgctatggtttgaatgttccctccaaaactcatgttgaaacttaatccaaaatatgacaatatagagaacgagctttttaaagaggggattggatcatgaaagttcttccctcatgagtggattaatccattgataagtcagtggattaataggttatcttgggagggaaaccattagatttataagaaggggaagatagacctgagctagcatgttagcatactcagccctcttgccatatgataccctgtgctaccttgggactcttctgagagtccccacaagcaagaaggctctcaaaagatatgccccatcgaccttggatttccaagccttcttagctgtagaaaataaattcagttctttgtaaattactcagttttaggtatactgctataagcaacagaaaatggactaagacaatggtcttatccagaactttgtaaactagaattggctgtttagattcagtatgtattttttttatagattcaaaataattttgttttgaactgtacaatgaaggagtgtcataagcttttccacatgtagaggctctaaatatcagtctggcattgtgataaagcagagagtttaaacccaatcctatttgtgccccatgaccgttctttctggttacagttcagaaaagtaggaatggatgtgtaactcaaggagaagcatacaatacatgaagctttttctcaaaattttgatttagaaaatgaggtattttagtatgttaattataggcatctcaactgagaagtctaatagcattgggccagaattgtcgcagcagtccaaagccatggataaacttaagttaaagggagcaaatactaacagccttccaaattaatctgtattggagaagatgataaacagatgaatgggaactagaaaccatgcagacttggaactagatataaaacaaacagctatctaatgatttcttatttactctgagcccaagatatttttgtatccttttagttaaacctctgttttactaaggaaatttaaataagattctgtctcttgcaagaaaataacatctaagacatcttcgtatttaatactgccttaattttgtttactccagtggtccccaacctctttggtaccagggattcgtttcgtggaagacaatatttccatggacagggttggggggaaggtttcgggataaaactgctccactactcagatcatcaagcactagattctcacaaggatcaaactagatcacttgcatgcgcagttcacagtagagctggtgcttctgtgagaatcaaatgctgccaatgatctgataggaggctgagctcaggagtaatgctcactcatccacctctcccattctgctgtgtggcccagttcctaacaggcccggtaccagtttgtggcccaggggttgggacccctgttttacactataacatttccacacgtctctcatggcctttcagatccactgcttgtctcaactcaagtccagctacctgaaaattcgattattttttcaaagtgaatttgaatatctttatgttgaatacacagtctccacttttacgcagcccctactgtcttctatcatacctctctagccctggaagagatcaactttacattcacttttcctgttttagggctattattttatcttcaattaccaaaatctatctacatttagatactttaacttgcaaatacatagtaaacaattacagattatttaaaatagcagttttcccatgagtataaaaaaaaagaacaataaaagcaatatttgttgagtattttaaagtgccaggcactgagcagtgtgctttgcttaagtaaatgtttgacaaaataaaaggtcctttaaaagttccatgctttaacattaataaccatataaagataaggttagacttcctatcaaattagcagttttgtgaagataggccttttctgctatatagaatctcctcaaacctgagtgttcgtattatggattatctagtatactccatagctatcaagtttgtgtatgtttctttctcaagcaagttatcttatttctccttatttcttcagacttatcctttcttttcttttcttttcttttttctttttttttgagacagagttgcactcttgttgcctaggctggagtgcaatggcatgatctcggctcatcacaacctctgcctcccgggttcaagtgattctcctgcctcagcctcccgagtagctgggattacgggtatgtgccaccacgtccagctaattttgtatttttagtagagacggggtttctccatgttggtcaggctagtctcgaactccgcccgcctcagcctcccaaagtgctgggattacaggcatgagccaccgagcctggcccctaacctctcatttctaaggaaatgacaaattaagtcttttatgcaaatacagtgtagggtcatttaaaaatattttttgtaataggtgtctctgtacataaatctatttaattttttctcttttacagtaaaaaaggcaatactgtgttttagtttcaccaaaaatttcagtagaccaattgtgtaaagggatacatttatatgaatttttttgacatagtaaaaactaagaggggaagttattcaaatatttcagcataaattccctttccttgaaattgcaatcgtcatgtgtagctacaattcctcagcattcctctgtagtataagtagctacaattcctcagtataagaaacactaaggtggaaaattaattgttaagagaacaaagtcataacaaaacaacaaaacaaaaaagtaggatatagaaacattaactcaatatcactcttgaagctcacataagagaaattattgtactagacactgtggttcatcatccagaccccatcttcatgggaagacatcgatcccacactcatggggaacatcagcagctgacaattcacacctgtacctttcactaaatattgtcctaagacaaactaaaatgaactaactcgcccaaagtggtgcctcctttcagagagcagccattgacccatggctggctaatgtagttatacaaacatgcaactgctttgcatcaatttgggacaactctgaaagaggcccagtaggattggctgaagactcagttcaaagttgtcaaataaagcacaccatgcccagctgaatttacattgtttactatgagtatatcccacgaaatatttaggaattacatatactaaacattattcatgatttatatgaaatttaaattcaactgggcaacttgtacttttacttggtaaatctgggagcttttccttagttgcatctgcatggcaggtaagcatgtcggtatgcccagacctcccttctttgcttccttataagtgcgtcccagaaaacaagcaatcatctcagagccaataggcattgaggcttttgataatcaaactcccaaaggtcaaggaaaaagagagtatcccaaaagcaccaagagaacaaacaaacacataacatacaatggagcttcagtatatctggcagcagacttttcagtggaaaccttacagccaggagagggtgacatgacacatttgaagtgctgtttatgggtcccttcggattgtaacggggaaaacaagaattgtagcaggaagaattaaaagaaaagagagaagctttttttttttttaataatctgatctttttctattgagaggcaggcacccaaatgctgcttctgtcggggagtgaatctgtaaattctttgtaactctgtgctacctatttgttaacctgtgtaatttgttctcctgctgacttcttgcaaacacttgccagtgggtatctgaagcctcttacatcttctgtggcacggacttggcctatatttagcatattcactcatctaaagtgggaagaagaatctggcatcttttctctttctccatcttgccatcaaaagctgcctcaatgagcatgtagccttcagaattttgaaagcaagaagcaggcaacaactggccatgtttagcttcatcttgaaactcttgaggacacctatcaaactttcccaaaactgtctcatcatgtatggttccattgcaggatgggtgcaatgctgagtgccagaaggagagggatatcccattctttccttcttaaaaattgctcccagtctttttgagctctcttcctgtttggaaggagaactaaagcaagtttagttctccttacaaaagagaaaataattaaaagcactctcacttaggtaactaattcactttctatatgataattcttagaatgtctagtcctctctttacataagagtacaggtaattgaggtcagtgaaggttttagttacagaactggtctggctactttttattaaaacctgcaaagacttaactgttcttctataatttagggatactcatcatttaatagggaataaacaaaaatttgagacaaaaggaaattctgtatccatttcatatatatacatgtaaattacatatagaaaaaatggtttagaagaggagttaatatcaatttaaaaacgggaattttaaagctgggaataatacatagcataaatatgtataaggattcagcaaaatgttagttgaaacagggggctaaataaacttgaagtttaagaaagttaagaaatgaacccaaatatgcataaatctgaggacaaaatttgatattgctgctaataaacaagggaggggcatcatattgggaggcttcattaataaaagtaacaaattatgagaacaaatagtcttgttatagtttatctggtgaagcattttaatgaggcatagctgtctgttccattaccgaacgacttttcttatgtgtgctctggtagattttcatatggctacactgaaagatattcccaaatgtctgactaataactctatctataggcaactgttctgaaggtttaaagtaaggaggatggggttcatttagaaccagtgggaaaaaatgctaatgctgggctttgaattttatggatgctgtagctgttatttttcaattaaataaatgttttatatgccatgttttgtagctatcgcagttaaactgccctcatctttttgcccagcaaaaaacccattaagatcttcactgagattgagtctaggtttttataaaattaataactttgctactggtttctcaaaaatgagtagaaatgacttttcaatgcaaatgccagtttttgatacagtgaaattatcctgtctgcagtgactatttgaacttttatcggcaattggacactgagagacttagtatatgaacagatttatccttagattatctaatacatgctttgcaccctgcaccataaaacccgatctatttttaaagccttggttgttctgaaaaatgaaatgaaattgtattaaatggcattttgactggggagaaaaaaaaaaacttcatgtggtttaagagaatggatgccggcaattgactgtctactgtttattcaaaacttatagattagcagccagatgtggcagaaagttggctgatttttcattcacaacaaaaacgatgctgtgcttaatgaatggaggtttgttatcccagtaataagtaaaaggaacatgaaagcccttgtgtttaatgttcatgcaaataagctatttgcaggtggcttttgggcagggtcaagtattttcaaatatttttcaaaactgggtcaagttttttaattgtcaaaaattaccagctagaggaaaacctcctaaaaactttattatgctatttcccaagtaaatgaaatgacaagtcacttatcatttaaaaattacatatgaaaattcttttccttatgatttcgtcaataaataaattctagaggattctagatatatttatttggcatttttttttaatgtggtatcaaattttgtggacattctttagagaatcaaattcttaaaatggcattgaacatttaatttaaaatgtccttcttgaaccatacatgtttattaaaaaattattttatataggttatccattaaaaaacaattttctatatatgtaaacatttatgataactgctcattattttggtccatacttatttatctacctatttattaaacaatacaaatcatacgctttgtaaaaataaaggcctagtctaatattactctctgtcagaaataaaataattcagagaagtctgtattagaagacaaaataaaacaaaacagaaaatgatgagaatcacaaaaccattgccaaatttccagctatggcatttactctccatgtggccttaggtatcttactctcttattttaacctttctttgattactgtaaaaataatttgttactaagaaaccctcttgctttagtagctgtgagtataaaattaagaacataattctcaaaaagtgttttagtcttcctggaaacattttaaaatatcaattaatcattgaacaatacacaatcgcctgatcatttgctaagagagggttgcattctcatctctgttcacttctgtcctttctgagacttacacaggtatgagagctagaaaaaatattaatgtgtagtaattcaaaatttctcattcatgaatcacttcagcagtgcaaagaatactttgtaatttttaaaaggcatttttattaatatacttctactattctaccccaatcaacagcaaatttacctaaatcatgagactactggtacttctaatttttagaaaagaatgacataaactgctaataaacccaatgaatcctttacccgcaatgagaatgtccacgagtcagctcttctgaccctctggccagtgttctggagttactgatctccaactttctaattgaactctagcttggtatgtgagagcagccatgggtgaaccagtggagcaagatttaagccttgacattgccattaatgattcaccacctgttgcaagttcaataagttattcacacaccaaattgtggccgcaaaattctgggagataaactaagttagaaagattgggggtgaataaatgtttgctaaatcagaattgttaatgatagaaatctgtatcttaacaaagttgagaaatcttgtcttcttaacgtgtatttattgacttcccaggatatgtcttagtgaggaaacatagcttctggcatttattattagagtgataaggaataataaaccacagtgcttgagagacagggaaaggcagggggagccagagacacagtaacagaagcagattaattgactgatgaaataaacttgagataagagagcacagaggaggttcaagagatggaaccatatattcctctctatctgctcccaacatcaaggaaattcatagcatattttataatgaatccctgataaatattagtctataattgaaaatctattaaaatgactatttcttagggtacacaaaaatattacaacaaaacaagtaaagaaaagttgccatgggatggaatattatattttcctgcatgtctgcttcaaggcagaatcctaatggtcatgtatgtaggtaaattattctttttacagcaacttctgggaggtggtatttggtgcagtataaaaggcaaggggtgtagtgagggtaaagcgtaagtactttgatcttgagccttgactatattggacttgggatctcggaaatcttggggataagcagtggattaaatccataaattagtaaagtgttgattatacaacaggtagaactacgtgccacttttggagggacagtcttcttttttaaaaaaaacaaaaggccttaaaggctttatgtatatataaagccttttttaattataataaatacatttttttaatgaaacaatctgcacatatacaattccactctcaagaaaggcaattatttacataattatgcagaaattcctataattatgaaaataattgcctttcttcagagtggagttgtatatgtgcagattgtttcattttaagaaaagaaatatttactgatttgattaactgaagttctggatgcttaaaaaatgattaaaatacacagatctactatctgtcttcatgaactttaaatgtcttgtaagaaattcaagtaataaagactacaacatttattatttaactggaacatgtattatttattatcctaactgtggttaggaagcaccattatttattatatctatattaatcaagttgtatcctgtaacaggtttcctgttatccactcatgtcttctaacttctgaagtattgtttaaattacaagggagaaacctagacactacattttctaggatctcaggacaatagagctccaggtgaaattatgctaaataagggcatgagtgtaagatgtggatgtcacagtgaagagatttagagcatttttctggtgacctcctgtttaggtttgacaagcatctaaaatcattgttagcaactttcccataattattgcattttcagcctttatgaaaatagcagcattttttttcctttctttgcccatgcacaccatctaatcatgagataagtctccttctgagtccctaaatacatgacatacatagattgggatctttttctgacctgttcctgtctgatacattcttcaactctaagatgagttcatactcatcttctgaagcccctgggaaatggaaatattttttcatattggatgttggtagagacccatcatttaatgaacatttatgtgccaggatttgtacaagacacttagatacattattcatgtacctcacacaaatgtatcaacaacacaacaaaatgtctgtatgaaataataattattatatcccttatatggaaacagatccagagaggaagatacactagcatgtgtaaatagaggattcaagtattaaacatccatctgtccaactgactacaacctctttcataaaatgctaatttctctcctgcttctaattttcttatcaaaaattgtcatctattgttattgggtctatgggtgggtagtgactccttggtttccattttgttctagcggattactgtcttctttatttttgttctagtgtttattgagagtcctaattaattaacctggctgctctgacttccatcagctcaccattgtctcttctcccagctcataatttctgtaacagagctctaggctatgctgaagttctgctatatgttgccagtctctctagatccaagtgcctcttgtcggccaagtttacatgcacgtgtttaaaatcttcttattgactctatatacaaagtcttcacatgccttcctccttaaaataatagcattgtgagaagaaaaaaaaaatcatcattctttttaaaactaattcaggatgtctatgttatacaacaacaagacgtgggggaatatttacctggtagttctgtccctcgttatcattctcactcattataaaattggtatctgaaaaaaatcttgctgcaaaaacaaaaaaaaaatgtatagggtataaagaaaaagtttgcttcacatcataaccattacccatcccattgccaaagggaagattgtacactacatgattccggggagcagcattcacatagactatagtgtgcatggtacatgcaagagaccccatagtactacccgctttgtcctccttgtagacatgctcacagatgatccatgctccctgacctggagtagtcaaataaaagagtagcatcaatttattaagattctttccagaccattttctaggtattcccattatatattccttcaaatggaaggattttattctgtacatcacatctcactgtacacatttttttctgaaatctgaaatctgagtattttaattttatacagtttcaattgtgagaagtacctgacagactgacctgacctaacactctctaagctaaaacactcataaactagcatagaagctttacacatttatccatttctctaatttacttatctattgtttcctgaaacatctattaatcttgcagttatttgagatgactgtgagcttactatttgccagggatggcatgagcaccttggtttagtctagtgcctggcatttattttcctaaactgtggcagcaagtttagctgtaagcatattttttatcagaacaatcatccatctttaactacatgtgaggaaagtactttcttatattgcattacacatttttatatggccacagaaatccttacttagtctgacaaaattatggtagatttctttctcctaaggtcaaggaaagaatcattctgtactgtttccatggagatgtttctccttttctcaattgccaattgtctactgtgtgtcctgggttccttcttttcatatgtcatgaggattctcaccccagcattctgctcctctgagtcaaagcccttgactttcacttctcaattgttttgtttgcagtttttttgctttcctttatttttcttactctataaatgctatgaaagtgtatgtaaaaatttacccatcttttagtttatatttgttatcaccctttattcatataccaaaccatataggaaatgaatataaggagatctttcttagtaggaggtagaagtaaaattttgtttagaataaaaacagaaaaaaagagaataaaattccatatcaccagtttgcttctaaatgcccaatgtttccacttatgagcttgctactgtacacaacgcaagggcttgtaaaaaattgtctaaatgatagtggttaaggacgtattttaggctaggttactttaaaaaaatatatcatcacttctgccgtcaaaagtgaatttgatgtatcataattgttaaagttgaggagggtcaaggattcttctcattctatggtttccttataaatacactttctaataaatgcctaatttttttctgtgaaattaaaccattagatattgctgaatgtctgtatgtttcttacttttctagaatctcattcttaattatagttttatatttttccttcaacaaagtcttaaaacccatgcagctggtgtctattatttacattctgtgatgtattttatttgactttgtgtttttagtcttttcacagaaatccttttattgtgatcttcttgtccaaaagcacttatttcatatctcttttccatacctatcttcattagcaggttgcatttcagtttcttcagtccttttttagataatatattttactacatctgtcttcacaacactgtatacgctctgatgatcaggtctcccttcttttttttttttaaattctcgtcctctttgggacccgtgacaaagtaaaaggcagatttttttctcacctgacttaaaagtaaaaaggtggccgggcgcagtggctgatgcctgtgattccagcactttgggaggctgagaagggcggatcgcgaggtcaggagatcgagaccatcctggctaacatggtgaaacccgttctctactaaaaatacaaaaaaaaaaaattagccgggcatggtggcgggcgcctgtagtcccagctactcgggaggctgaggcaggagaatggcgtgaacccaggaggcagagcttgcagtgagccgagatcgcgccactgcactccagcctgggagacagagtgagactccatctcaaaaaaaaaaaaaaaaaaaaaaaaaaaaaaagaagtaaaaaggcttcatatgtttctcctctgattcttcttaggcccagcatttccaaaaacaaaatagtacacaaaacattagttgtaatgatacttcaaaaggttcaaatactagtttttggctgctttctgactatatttttcttctaaagaaattttgttatgaagtattgaactattcagtatactttaatattttccaaataaagtttccaaactgatatttaacaatattctcttatattcaaacatattctgaactattttctgctgtgtctctagatcaatatttataaatctagattgttcatgtattttttttcctttgctaactttcaagatcatatcaaaaagcaccactgttgattccattttttatgtttcattatttgaaactatattgacatttttcctcttctttatcattccctgttatctcatctttgtgagtcttccaattaatgttttttcctttgaattatttattttttaactgaaaataaattgtatatatttaaggtgtaccacatgatgtcttaaagtatacatacattgtggaatggctaaatcaagctaaacatacgcattatatgcattaccttgtaatcggaccccttgaggtgtcaatacctcagcatttttagtgattgagataacaaaaattcgaattaggcccttgcttgcttgcataaaagccaacatcccttgttctcacaatacaattgcaaactgctgatttactatttctttgtcaaccaggagaagataactttaaggtaacaaaaaacatttgcagaaggaatgaatgcctataaggatgttgcaactaactgctgaggcccagaagtctggttgctcaggatattatcagagattaaagaaacacagactttccccttggttccctaaaactccccctctcttactgtctagctgcaaaaatatcctctctgcatttttttttttttttttttttttttttgagacggagtctcgctctgtggcccaggctgcagtgcagtggcgcgatctcggctcactgcaacctccgcctcccaggttcacgccattctcctgcctcagcctccctagtagctgggactacaggcgcccgccaccatgcctggctaattttttgtatttttagtagagacggggtttcaccgtgttagccgggatggtctccatctcctgacctcgtaatccgcccgcctcggtctcccaaagtgctgggattacaggcgtgagccaccgcacccggccccctctgcttcgtcttattgttaagacatgtctgagagatcttgccccgttctcactttggccaaatggaataaacttttatctatccccaagcattggtgtgtcagtgtttggtttcaattgagcatcaggtacatgagcccgaatttgggcctctacaacatcttcacctacttactatattttgtgtgtgtggtgagaatacttaaaatctactctattggcaattttcaaatataaatgtattgttattcaccgtagccaccatgatgtgcaatcaattttttgaacttactcctcctggctaactggaattgtgtgtcttttgaccgacatctctgcaatttccccatgccctagcttctgatgactaccaattaactgtctgtttctatgagttttacttatctaaactctctatataagtgagattatgtcatagttgtttttaagtgcctggcttatttcacttgatgtaaagtctcccaggttcatccgtgttgttgcagaagatttcttccctttttaaagcccattaaccttttatagatctggtactgaggcaatgcaagcttattggacaattatatgttatttgaataaattgaaacataacagcttataaagggtcaaatggcagttaatagcctaagaaataggtttggaatattatttcttagcataaaggataatattggtcagagtcttctaggcttgaattcttggctacttagattttatcaagtaaattgtaaaaggatagtcaatcacttttttcacatgaattgctgtatgaatttcgacttgacaagaaagactgtgaaaacaaaaccactattatctgtgaactacctaatgtggaaagaaatatccttaaataaaactttgagaaagtagattactcaattttttcctacagatatcccatatattgtaactaattataatatttaattgaatacaaaatctttcttcttaaggaaagattttattcagttttagaacgttaaagtttctccactctaatatatacagaacttctttaacctttaaaaatattgcttcacttattactcatgataattgggccacatacataattaaaacacaccatttattatttccccttgtaaaagtggcatctggttccccaacttaacttcaaactgtaattttaaacaaataataaagtgttttgaaacattaatgtggttaattgtcttatctattgtctatgttcatcaggagctgtgacatgcccaaaggaaggtaatcagaggaaggaagagaagaagctaagttctagagaatccattaatcatggtttagatgactgaccattttattattttcattttccatttaaaaacgttccatttttaaattggaagggggtatgttttagaatagaataacgaaattccctccatctcctcgtagtgtacgtgattaagaagaacctaacagaaacataaggttctaaggttcttgctggaaataataatcagaactgtaagaattctcttatagaaaacatttaaaaaaggaaattctagcaatagaattcattgttaaaactgtaagtcacaacaatattgtctctgcatgctgactgtactcctctgtaatcttcaaaggcaaacaggaacagtaataatcttttcatgtactctcaacttccttctctgaaaggctagaaaatgtcttatatgtagcactcatactgtcatttaatcaaacccagtttctatttttcttcaatttctagaggaatggctacttagtctttctggcataatgtgaatttcttaagtgtctgtagactacatctcctatttttacttcttgaagtttctctcaaactgtgataaagagtgtcactctatcggtactgttaataatgtaaattttgtttctctttttgttactgccaagattccactgactgttgaaatataaaagaaaaacagcattaaatcaggtgtgataaaatcacctttttctgtttatctccaccactggcatttattggcacttggaaactatttataaactcatactcttgtaacagtcttgtagctgaaacccactggattcaaaatctattcctagtacttaactttcttctgaaaattccctcatctataaatttgaggatgatgataattgcaaagatgccagggaaatttataatcattactgaactaatccttttgaaaatataaagcagcattaaatgttacgattactaatctttttaattaaagtggcaaatgtgtccaaaaatctgtaactaagttcattactctcatttatgcagctaaacttaagttctaccaaatgtatttttaagttgattaaaaatatggttggcagcatttataaatacccattattaacatgctatactggtaaatatatttctgctcttatgactagagagtgttgtactttagtaaaaaaattatacctcaataattatctgctctcctatttttattttatttgcaatagatatgtatttattcatgcatttgtattcttattgaatgaaggatgttatgtcacttgcattgagtacataggcatccctttcgacaaataaaatcagaatctaaactacagaaccaggttcaagtggggacagaagtacaattttaataaaggtcaaagttttgctagtgtttcacttaaaatttatttttaggctttctgaatgttctcttaaagaaaaagacttaatcatatacgtacttttttgtattgttaacaaggaagaaacatactaatatgaatggtactacatacattatacatgttatacaagagaagaaaattatatattcaagataaacatttttataatcacaatacttcaacataaatgtgttcaatatagtaaagatgcaggttgtataatttgtcaagcaaattctcaattatgtttgaattctatttaaaatcaacattagtattgacaatattcatatttaaggctttttaattatttaaataggttcaagtttgctgtgttcagcattattagttgtaaaagtaggctctggtaccgaaaatatatatttttagctcccttctgtcagtctttccattaaatgctatagactcacagttttacatgcttctcagcacctcactgctcttgttgcctataatattttattagtttaatccttctgaaataatcctggtcattcaaaaccaatacatcaaaatcttctagagtgaacaaaagaaaaaacttttgtgaagattaaaagaaaaaggagacttctcagatatattaactttaaagactatatctcacaattatgtaatatatttgttgctttatctaattagatttgcatttcttatatataccatgcatataaaaatatatttgatacaaattataatacaaggcatacaaaaatagaccattataataacagaacattttctaaagggattttaaaactgtaagccaaatgccttaatctaatactacttctaaaatgtattctaaagaaataatcttgcatgtgtggttagacttaattacagaaatattcattgtaacctttctttagaagtgaatattgaaaactgaaataaatctaaatgtccaactttataattgctagttatggaatactaacaaatgaaatccatgcttttaaaatagcatttagtgaagcaaatatatgttcaaaatacatataaaggaaaaactggtatgttattaaagaagatagaataaaatttattttgagagtgtatgctaataagacagttttgatatttaggaaaattaaaatgttaggtaatattttaaataaaaaaataaattttctgtttgctgagattatacgtattttaaacaatttttaatgtacgctatagacactgaacatgtataatttatgtatcaagaaaaaaatcaataagttcaatttttaaaatcaaaattaaaagtcacataatagatcagagaagataaagatgaattacacttttttctttatctaacaaaagagagtgcatggtttatggagacagacaatttttttctctggttttaactctaagatataaaaggaatctattgtatacatctggaaataagaggtatttaatacctaatgtatattaagattactgttttagctttttttttacaatatagaagtactgtgtgatgacttaccttatcaaccattgaaagagccattttcaaagattgattaaaatcgaagagttccataagcaattttcactaaagcattgaaaactattatccaagattaagaaaatacttttctagggatccctcatatctagggatctaatgaccattagatccaccttgtataatggaattaggacaacccaaagatctggatgattgaattgtcatttggggattattaccatcatacagctcagtttatggcaatttctatacatgtgtttagtattaattgaaggaaactcataggaattagatgccagacatgaagactatatacatatcttcagagcgcttgtgtcctaaactgaaaagtgtgttttaagagtctgggatatgaaaccaccttttctctattcttgtcaaatccatgtcattctagctactgacataatttatgcaatataaatacaaataataataagcaaagttatatgaaaatatgtttccagtatataggtagttttaaccattctttttagaagaaatgtgtgtgtgtgtaaatgtcttaattgttaaaatgattaagtcattcacaggtttgttaatgtttttccatgtagctggagtgataataatttgtattacattttagagtggtttgatgcaaataaataagaaccaactcaaaatgttattgaggttaaactccaagaagacaaaaggaaaactaaaataacaaagtaaactataattaaaacatttcaactaagaaaaaagtaaaaagttaagctatctcagacaatgttcgagattgaagcttgttaattgcaatggaaaaactgctaattaccacaaatagtaatttagaggcataaatattacacaggtgtggctgcaggaagttgatattaatcaaacacatttggcattttcaatgttgcaaaaattacaattgtaaacaccttccatacaatcaaatgttatgtgaattttaaatgagtctcaataaattatactgcataaaaacaggatttttactatggatcataattgttaatgtcttccgtactcaaggttgaaatataaatcaattcactctattatttggtttggaagtttaagaggacaattcacatttcctttgatacactctaccagtgtcactggactggtgatgtgacaagaaaggtcttctgtagaactgaattgcaataatatggagattataacaaaattatatatgtacctaagaatattgactttaaaagccttcttcagattgcaacattgatttccagatctgttgggaactagctgccttacttaatgtaacagtcttggcaatggaataatcatatatatcacccatggataattaatttttaatcattgaaattcactgaaatatgttgaacatgaaaattatacaaatataattttgtatgctgtttcagattctttggaattttattctaagcatcaatcaagatggtatagtacgagaaaggtagaacatgtaattataaattcaggattcaggaagtttatttttctcttctttttaattctctcaaaatgatcttgattcctgcaaagtgttagtgtatctggtaagtaagagtctatttcttttaaacttcatctgtattaaccagctttatatgaccaaaatgtcccccaaatttaaatctttgcacagtaaggccttatatgtacacctggcctcatttcaaaagactaaagcagttgttctcaaattcagctgcacattaatataaactggaaaactgtttaagctcctgatgacaaagccacatgtgagactaatttatgctgaatcactgggccaaggacccaggtatcagcattttttaaaactatagaggaataaccagggttgagaaccactgcacaaaatggtacatgcaacttttatttaagttattttttttaaataaataatggttgaatcgatattgatcttagtaccaagtcatggcaattttttcagacttagagaattcatcctggcattgagattattaaagaacctagaaatccaagtgtttttgtttatatttttcctgtaaatattagagtatgctagtgctcatccttatttgataattttggaaaatatattaaacatttgagattgaatatcaaaaatctctaaaagaattttagaaataccattcttctatgaaataagtaagctcaatcaagatacatattatagtgcccatttaagaaagtctaataataatgcttgcactgcttaaagattaggttgataaattaattattgttaatcctacttgcataatcaacggacacctagcgatggagtcttaagtatagacacagaagttgaatacttttaagaacttttaaatttacatccgggttaagttttactttaaaattatgttgagtggttgtgattagtacatgtgtgattagaaccgtctttctcaggttattacatcatcatatagacacaggaaaaataatagaattaaaaataaagcaagaaaaataatgtaacactttattggcttcagataattattttgagattctaatcctaccaaaacattctgcttttcttaacttgatcctacttttgtttgtttgttttaataaaggatgaaccaatatcctgagaaattttcaaatagggctggttataacactaagaacctagatctcactatgttttagaaaaattgtaaagtatttcaaataatcagtaaagtttcagctctgcaccattgtgtctttgcaatatggggaaagtcacttcacttctctccctctctcgtttttggcacatgtaaggcagagaaaataatatctactccagctatcccacatgttattataaaatataataagagatagaaaatcactttataatgttcaaagtattataaaagtaagccatgattatatgtgggattaacagcagtttgttatttaccatttaatgtattcctaatgtacatttttgccatatttaaaaatgtttacatttcgatttttaagtgaaagagtaacggtatgacattatgccatgttatatctgatgccattatgtcaaacaaacaaacaaaagcattttaaactatttggaatcttaccaaaataaatcttataactatgataatacaggtttttgaggatttagtttgtacgcaaaaacagaggcaataaaggcaaaaatagataaacaggattacttagaattataaaccttgtgcagagcaaaggaaacaggagggtggagggtggagaggcaacctacaaactgggagaaaatatttgcaaaccttatatctcaatgtactagtgactatcaccctaataactagtcatgggagcactgtcatgcatttggtatgttttagttttcgggatgctgccacttaccacggcgggagcctgatccctgcggaatcgactgtagctggacttatcttgaatattctgagccaacataccaaaccataaggtgctaattcattcatgcttgaaggccataataatcaatacacattcacgcacacatgtacgttcacgcacacgtacgttctcacacacccgtacgttcacacacacacgtacgttcacgcagtatttaaaggagtgcttccgattaaatccgcagatctgccctccccccatctctgagtttattgttaaattaggtaagccagcccccaaaaacaagatacttaaattgaacctagtcagagccctaaaaatcataatttaaccatgaacactccaaccctagcccctcgattaacgtaattttctaaaaaatcctaacattctccaaccaaataaaatctcctatttcgatgctaactaaatctctgtcctaatacttatataatacttcaggtatcccgctctgaaaagcttgtatcccagatattatagtcctaaatcaaatataacttcaactacaaatggcccctcagcgaaaacctctgctagttcaacttttttaaaggccctaaacttccaggactgtaaaggaccactttagatttatacctaacaagatcctaccctgacatccccctagtatttcaaaataccactcaaatgtttttcacccagttaatgtagcttaattatttaaagcaaggcactgaaaatgcctagatgggtccgcacaacccggtaaacatagaagtttggtcctggcctgttttttgaattcttagtaaaaaattacacatgcaagcatccccgccccagtgagaatgccctccagatcacctggatcaaagggagcaggtatcaagcacgcataaacgcagctcaaaacactttgctcaaccacacccccatgggaaaaagcagtgataaattttaagtaataagtgaaagtatgactaaactatactaatatttatggttggtaaattttgtgccagccacagcggccatacgataaacccaagctaataaaactcggcataaagagtgtttaaggtctacattcagtaaagctaagctccatctaagtggtaaaaaactccagctgaaataaaacgattacgctccttgaggataagatgcatattgtaacaattttctatatcctccacaatgttttgcagattcaataactatttaatgaattgagttaaatttgcctatactcttacgctcataaataaccttctaattctcaattcctctaaaacatagaaaaaattgccaatataaaaaagcaagaaagaagatattaaccattttgtcattcaaaatatgactcattcttatacaactacctttgtcagcattcttgccattggactatctagactttgacgctggtatatcatggcttgttgttagagaaggtaaagtttggaaaacagaagcagttatgtaaagcaatcttagaaaatccttgagtttcccttagaattttgtgtcttctacatgttttctgtttcacatagattaagtttgcagagttatgtcataatttcatgagcgtatctgtcagagagccctttgaaggcctatttaatccaactaagaccattttttattgttttaataccattgaacttgttctgataattgaggaaaaagagaaagacattccatataatacaccagatgcctaagtgctttggatagtcataagccttttctcctatagcttcctatttagaaatgcctgctcttcagagttttcttaagctttccaacttgctccttccattttataagaataatagtctatttaggaagactattatcaaataaaaatcagaatgatcagtggacacctattttagccttgggatttatatcacaattccctaagactttatatttccagaaaagaaattcaaactaaaggtcacaattactattattatagtaatactgataagatgtgcattttaactaaaagaagttcccactatttttttttctttctacttttcaataatccttgggaccttagtaggagtgtgcagtagtcttgtggtgtatttttagtttaaaagtctgagcatacctaattaccacttggtagatattgttcaaactcacttttgaatccaagtgtttttaccctcatagaattttttttaaaacgagtatttgcttgtttctattatactgtaactattggagctactaggaggccttttaaatttcaccaacaagtaggcagaatggagactaactgaagggttgatgggcttaaagaaaataaataacctaacaaaaccaccaggctaatggcaaaaccaacattaggaaccaagtcactttacttgggattagtggataccaaaatgtgctttctcggaagcagcactttacaaggaaatatggaaatccacctttgttgtccttcagctaaagggaataaaatcatgtactttctataattttaaccctgttataacagatgctacatgaactcaagtggaactctgactgccttgagagctgaataaaatgcatcccaccatccgttgcagccgcatcaaggtattaaaaagagagacagaaggaagaggtgagagaggcacaagttcaacagtgtgaggcagtcagacacaatgggagggagaaagaaataaatgtctgaatgtcattgaaagaagagacaatgaaggcatatgtaagagtcctgctaaagctatggaacctcaggagcctatttgtaagaactacaatttagaatagggaacttgcaatacaatgcctgacctttatttcctttcctgcctcgaacttgtgaaaacctttgattgacttttctatgaacatgaattactgttacaatatttagttgaacaatatgaatttctcaaagcagtaatacagcgctacagcatagcttaacattgtttaagtaatatggtttgcttatatttaagtcatttctaagggacccatgcaaacacagtcaggagatctatttctgatgtatttccaaggctagaaacaaaaaaatgctgttaatgcataaacagtcaaaaaaccatgcactgtggttttacagggacctctatttctaaagatgattgttgcatgagggtctctgcctttatgaagggaaatgtgtagattttaactagctctgtttgtgttttgaaaaagaaaatcatgtttctgcactaaaaaataaattcctaatcaaacctttaaagttaacatttagaacagggacagaaacttctgttgtttcctaagtgttttgctgttgttcctgtttagttttaaatcattttttagaagttttattgaggtataaaaaaattgtacacctttcatatattcacctggatgaatttggacatgtgtgcatacaccaatatcatcatcacaaccaaggtactgaacatacttattcacctccaaaaattttcttgtgttcttttttaatggtggtagtatatttttaagaattcagcctttgagcagggtacgaaggaccttcaacaacaaatgcaaaagtaaatgagctaagttcatataaagggttagctctcagtgagttattcaagttatgatcatatcctcaagaggcttgtaaactgactgtgggtttccagtttggttattcacagataggccttcatttgctcattcacctattcattcatatagccactcattcattctcaagaagaggtatttgtccatatctcaccatgtggatgagcagatggtcagttctcacttcttttgccattaagtgtgctcaccgttgagctccaggatggtattttctctcactttgcgtcattaccaaagtggctatcaagattccctcccctaccttctttttcttttttcaatgtttaagagctggagttaatttcttgactcctttggtaacacatgccgatatataccactcaaggcctgttggattaaactgttaaatttgtcatctagctaatgttttctcagaaccagacaaattaaacagagtcaattgttgaaattatttcaaaagataaacaatcatagaatggaaataaactacagaaagtagggaacaggagtaactaagtctcctagaaaacatttgcagcagatgttaagtatccagtctcgttgttataaatgaatttcaaagaatctcatgaggagcagctttacaaaattttactgcactaacaaatggcagccaacctctgtagtaaacacaaaatactgtaccatcctttgtatctccttaaattaagccaatttctgcttacacagaaaatctgtctgtggaaaacactgcttagaatttgaaagcacattaatctggaagccacaacagaagtgtgcttcagaaaacttcttaatatttttcttgtgagttattctctttacgcttttcacattacaatattaccaagttatcataatgtattttctgcactcccagagcaagataagactctagtagttgctgggaactatgcattgtctaaatatgggttcacattctctcacagtgattctggaatcatacacacaaatgagatcactgctgtcagatcactgggattaagactcaacctctctactcactggccatgtaaatatagatacagtactcagatcctctgaggcttagctaattatcagttgatttggtctacacttaccacattaattatttgaaaggattcgttgatataacatgtgctgacaaccataatcattattaaggcaatgtttaccaatatgtgactttaaaacagatactactattagataacaattcatactatacattcaatatttaaacaacagaattataattttgtgaagcaaattttgtactcaaacagaaaatccaattctataattattttctgcaatattgggtcatagaaccaacaaagaatatatgactggcttagacgtatgtaattacttatgcaattagtaataaaattcttcactcattcctagatttgaatccctgatgctctgcgtagcagctgtatagtcttggacaagttgcttaatctgtctgtacctcgatttcctcatttgtacttcaattttcttatgtggtaaatataaaattacttaactcagagctatgaggtcagttttatttgagagaatccagaataaaatacttagcacacatttcctaccattcagcatgcataatacgtactcaaggaaattttagatctctgtacatgattaatatattaaatcctcaaaccgactataatgtctgaaaatgcatgtctttatgtcactgtacctctcactgcacttggcacagtgttgtgaatatatttgtcatttgtatgttctttctaccatacaattctgccactccaattagcatattgtgttggaaaacaattgggtgcttgccttatgttttactaaatttatacggaactacgttgacacttccttgcccttcagatgctggcactcactggttgctttctagttctcaggagtctctgtgtgactctgtcctttacacttgccctgcaacatcaccctcagccctagacaaagccaacatcatttttaaaaacctgcaaatatgtctgcaattcactgtatgaatattctcattctatcaaaaccctgacctcactaactcaatggagcaatacaggatgagaaagtagtttatatgaaagtcatagaaagcttgctttgtttattcatccaaacgtatgtttttaaaggacgaggcttttatctgaaacaaataaaattataatttgaaatttcaaataatgtgactaatagattatgaattcatttccaaatatagaaataattaaaacacttggggtatagaaaaagtgagtgctgtatctattcttttcttatattaattttaccccagctgccagaatttagttttttgtttttgttttttttctttttctttttttgagaccgagtctcgctctgtcgcccaggctggagtgcagtggcgctatctctccgctcactgcaagctccgcctcccgggttcacaccattctcctgcctcagcctcccgagcagctgggaccacaggcgcctgctaccacgcccggctaattattattattattatttttttttttttttgagacggagtctagctctttcgcccaggccggagtgcagtggcgccatctccgctcactgcaagcttcgcctcccgggttcacgccattctcctgcctcggcctccctagtagctgggactataggcgcccgccaccgcgcccggctacttttttgtgtgtgtttttagtagagacggggtttcaccgtgttcgccaggatggtctcgatctcctgacctcgtgatccgcccgcctcggcctcccaaagtgctgggattacaggcatgagccaccgcgcctagcgcaaagatgtattttactaataccacagaggtataatctgctgctacttcttgatcaggagtaaacaagtttacttcacagcagttgatctaattttcttccccattcattcaatggtattttttttattgttatagaacatactgaattggataataagtccttttctttttcttttttcagaaatggtttctactctgttgctgaggctggagtgcagtggcattatctcgactcactgcagcctctgcctcctgggctcaagaaatccttcgacctcagcctcccgagtagctgggactacaggtgagcaccaccatgtccacctatataatttttgtatttttttttttttttgtagagacagggtttcactgtgttgcctaggttggtctcaatctcctgggttcacaccatcctcctccctcatcatcccaaaattctgggattacaggtgtaagccactgcacccagctgagaaggctttttattataggttgttcttattgttttatttatttggtttacttgttggttttcaaggtaagtttgacatataaggtggtataatgtttaaaggtcaagttatagagatagctagattgaagttcaaatccagagccaagttacttagactctctaaggacttgttttttcccttataaaattaaaataaagtggatagccacttcataggtttgtaataagaattaatatgatcatgatgtcacagagttgcaaagagatactgaaacttggctctgccaaaaaatattagctattgccattatgattgttctccttaatacctaaggcatttgctgacagtcaggttactcatcatgtccttccaggaaaaaaactttaagaatgttgaaaacttaggaactacttttaaaatttaattttcagacctgacataacacagctgaggaagagaggtggtagctgattggggatagatgtagagatcattaatggtataagagtgtgagaatgtgaagcaggataggatatgatattactcatacagatcacaaatacatgtcaaaattatatttatcattcatttaagtaaaattcaacattgttttcttcaaagaagaaattgcgcatttcactctacctatttaactctggaaaattttacaaattgagcatgccattttttagtatgaattcctttatttcagctgccctgctaactttggcatgatgagcagaaaaaaaataaacagaatgattagttctgaaatatgaaaaagtgtccaagaaaaggagtagtcttgagaagtagggaacaggatgaagtcactaggggacagaagggtaggagggagtgggaccagacaaacactgagctctgcatgcacacgtaacagtctaaaatagtcatccagcacgcagactctaagtcaagataaccaagatgaattgccaacttctccacaagcaatatgactttgggtaaggtatttgagttttctgtgtcttagtttcttcaactgataaataaaaatgatggtcatatctacttcataaaattgtgataattgattaatacatgtaatgaataacgtttggcatttagcttaataataagacttttcattaaaatattagctacttttgttagctagcaactctcagttttgcctaaagctgaccccatatctagggtgaggttttgaaagaaattcaacaccatcagaagtaggtctggaagttataaaggaaagcttaaagaaacagaaatatgtgcaacacctatttacaaagaatccattgggaaaaccccattgagcccagggagatggcacatgtcccctttggttatggaattcagttccctgacggtcagtatactgtctttgttcccaaggcaaactttttaataattgtgatcccactcaatagtcatgttcacttactttatgggtacatttgtggcatattttaaaatgtgaagttgagtgcatttcacctgaaaaccaaaggcatgtaatgacaacatgctatagaggaaaaattattgatttgtgtaaataggcagatcttgtttgtattctagctccatcacttactaattttgtgatatgggcaatttatatcctatctgagcctgtgtttcctctacaatatgaggtaatttctactttgaagtattgttatgagggttaaatataaattactttctggtttatgatgttggtatatactacttctatgcacaaccgttatttttatgaataagattttaacagtaagccacagaaaatataatgtaagactgattcttagaatctatcaaaacaggttgtaaaaatgacttaaacatctagcatggcagtgactaacattttgaaaagcttaatttttccattaagaactatagcccaacacagtgtctgtgcttcagtgttcctcttatcaggaaggataatatgtgtgatgcatggactaactctaatgaaaatttttattcttaagacacaaaatatttcccagcacagtacataaggtctttgtgcttatgtcagcattggagataaatttctgggaaagaagtagagaaactgctcatttctatagacatcaaaacaccaaagtagccgggcgcggtcactcatgcctgtaatcccagcactttgggaggccgaggcgggcagatcacctgaggtcaggagttcaagaccagcctcaacatggagaaaccccgtctctactaaaagcacaaaaaattagccgggcatggtggtgcatgcctgtaatcccagctactcgggaggctgaggcagaagaattgcttgaacctgggaggtggaggttgcagtgagccgagatcgtgccattgcactccagcctgggcaacaagagcaaaactctgtctcaaaaaacaaaacaaaaaaaacaaccaaagtaaaagtgaaaataaaggtacacagcagactttttctttttaaatacctaaactgaaaagtatacctgtcaagaaacatccaactcatgaattactttaaatatgtttttaaaacagcgtgcttgttttataacaatagattcatgctagttatctgatattccccagtggttgctttgtggagctcagtgtcatccttggagaacatgggcaataaaaagcatttcttctgcaccagtaagacaaaaacaaactgactacttctcacataaaccttggagggcttccctcagtggggttagtgatcagcaaatcatgtcaaataaccccttttgttatttttgacataatagtgttcctagcagacagtactcaagaattcccagattcttagctgtaacataaatttaatatactctcttttattaaaagtcaagctgtttattcacagtagctcttaggtctacgtttcattttacacatatatgtggatgtaatagctttttccttagaacttttaaaaaatagaattcagtaaaagtcctatatttgtattttctatgtgtcaagaacagataagcatcattaatgtgaaccaaatttcaattgaggagctgaaattaggaagaattgaaaaacacctgaaataaatcttcaagtaataaaggggaaagtttactttagaattagtgtatcaaaaatgagaaaattggctgggcgcagtggctcacgcctgtaatcccagcactttgggaggctgaggcatgcagatcacctgaggtcaggagttcaagacctgcctggccaacatggtgaaaccctgtctccactaaaaatacaaaaattagccgggcatggttgtacatgcctgtggtcccagctactcgggaggctgaggcaggagaaccgcttgaaccccggaggcagaggttgcagtgagccgagatcacaccactgcactcgaaactcggtgacagagcgagactccataaaaatcaatcaataaatcaatcaatcaatcaataaaactttttaaaaagtcattgcattatttttaaaaaattaatagtttcaaaatgtatacatgtaaaatctaactgggaatactttgtatctacttgtagcacaagattaaatttattttcaattactaggagatttgcacaatagagtatatatttactttaatctgtatgactaaaagcctcattgtcaatgtgactatgtcatcattatcacattcatgaatctcctgattataacctgcacagatggtctacctacagggctctgggataagaaacttgctgtctgtctacagaggaagccgttttcacttccagatagttctgaatatttgcaagtacttgctgatttagagtcaaattatgtcttgctgtaacatccatgttactgaacttacatttgagataaaccaagattagactaaaccatgccttcaaatgacactctcaaaaatgtgatgcaatttatgtgccaaaactatcctatcttgccattttcctccattttttaggaaaagcatggtcctagttttgttagccacagttgacactactattttaaatcactatgtcatttgtatatcctacatttgaacactctttagtgtcttcaagttaaaatatgcataaaaactgcacgtccaggatactctacctggagaaaaacatagctctcattaaccttgtccagacattaaacttataagagaaaaatcattattttcctgtaaccaaattactctgctaaattgtttttaggcaggattaataaatctttactgtaaagggaaagaggctaagattttaggttttgtgggccatataatctctatacaactgttcaactctgctgttgcagtgagaaagcatttatagacaatatgcaaatgaatgagtgtgtccatgctgcaataaaatttaatttattgcagtctattggctggatatggcctgcaggccataatttgccaacccttggttgacagtatagctagctaaacactgcttgttgtagtaaaatcttgctttttaaaacatatgtctctcatcctagtattgtcattacgtgtgtgtggtttattgttaaatatgtaatatttaagggtctttcctatttagttttattaactaaaagctgtttcataattgtaatgcacagacatctatataggtttttattttatcattcaacctattagctaatccttagagttgtttcatttttcatgtgtttgacagatgaacatgtctaaaacactgatgataatgttaccagaatataaacaaaaatgaaattttcaggttaaaaccattttgttagtaatatgtaagtatatcaattaaccattaaataatttaccaaattattccattacctaatccatattgctccttcttgtccacaagaatatagtaaggtacattgtcaaatacatacctctgactttagtgggcatttaatgtattattagaggatcctgatatctgtctttcttaaagaaattaaactcatccctagtgattatactttcttcatctaacactataatattaataacatttgaaaaaataatgtctaataattaacactagatttacagagtatttttagacaattttctaaaattatctgaaaaatttgaccagaatcattgtaaaattcacatctgagcttatgaaagcccactttattccactctaaaagaacaaaattttgtacttttaattttatcttttaaaatgttttaacataaaggtagtgggagacgttactaaaggaagcttagatagtaacgtatttgttgtctcagttaacacaaagaccatagatggggcagatctgcaggatgcaaaaactttcctttttctcacctcatagtagtcatatggctactgcaattctctggtttcatgtgcttacaaaatgtcctttagttaaaaataaaaagaaagagaaagagaaagagaaagaaagaaaaagaaagagaaagaagaagaaaagagaaaaaataatttcttcatgtgtctatttaaattaacaaagacgtgaattgtcccagacctccctgtgatgagtaacttcatgtgtcagttttactgggctaagggttacccacatggctgataaaacattatttctgagtatgtctgtgtttccagagaaattagcatttgaataggtaggctgagtgaagaggatcatcctcaccaatatctatgggcatccttcaatctcttcagagcccaaataaaacaaaaaggcagaggaagggtgaatttaatctgtcttcttgagctgggacatccatcttctcttatcctctgatattggaacacctggttctcagacttttgggcttaggttgaactatatcactaactttcctgggcctccatcatgcaggcaggagattgtggaatttctcagtctcgacatccttgtgagccaattcctcccaagaattatcttcttctagctatctctgtctctttctctatctatttcatctgtatcagtatctgtatctctgtgtcgtctatatctgtatcatctgtatctttatctcatctgtctctatctctatctctacctctatgtctacatctgtcttagttatctatctcatttatggttctgtttctctggagaaccttaactaatatagtccttatcttacaactcacttgccagcttaccatgattataaccaagttgatcacttcaaaagaatactaaataatatatattgtttacactaagagatagctagctactctcctcaagctgaatctggcccccacctcacttagtagagcaagcaaactaaatgtagattatacattttttactcattgaaaaaacccaaataataacttatgacatgctaaaatttaaattttgatatacaaataaaattttattagaacacaattatatttattcatttacatttacattatttgtctatggctacttttacactaatgcagcagagtttgttagttgagacagaaacaggccaataaagaccaacatttttacaatataaccctttaaaaaaaaaatggacccttggtttagactgatcaataatcctatgggaggattttaatgattttcatctgtagccaaccaagcacattttttttcttggctaggataaatttagaacatctatgtccttccttaaaatagccccacatacttgaaagtctgattctctcataactatatttttttctctgctgttaaaatttgaactcattctcttcagaaataaagaaagtaacaaaatagaaactaagcagtcccatttttattttgccatttatgagggcctatgccatctagcggtgatttagtatgtatttaacaaccagttcactgagaaaaactgctgtatttttagtttgcttaatttagtggtgttgaatatttcctctatgaccaattttggcttacgaatatgatttctttgaatgcaaagttgggaggagatgagcactgtgtgctcctatgaggagttccatctggctcaaacataaacactattaacatcactttgctcaagacatgtgattctctttcataatgcttcttgcattaactgcaatataaaagttacaatccttattatttttgaaaaactcaatttgtataggactcttgataatattttaatatgtatacattttataattttattgatattttttcttcttttatacttttttttgtttatttatatagtttgttttcacattaaatgggagaaatactgacattgttcaattcacacccagggaaattctgtgtgaatgatatcatattatatttcttttaatgctctaaacaatgttgtgaggtaagtgttatctctgatttgcatatgaagaaacatattccgagattaaaaaattgcccagtttcacacaaggaataaattggagcacaggagttctatatagatagacctgtatgacttcacagagtgaaatggacagataaacaattcactttccaggagaaatcacaggacaatggatatcagaagaaatgatgggaccagggtaatattggatgttttgtatataaaaaactaatgtgggcaacaaaaaagcatataaagtcactgaagcaaaatatatattgtgaaatctaaaagaaaatatgctattggtaggccatggctacattataaaaaacatttcatttcacataaagtatgaatactacactatgactatgagttaatattaaaaaattgaccacataggaaataggagaaaaaagtaacaacactgtggaaagcaaagaaaatgactgcaagatgaagctatcaccaccatctcgtggccacatacggacctcctcagaagcttagatgaataaagggaagagactggagttattaaaatttgtaaactcagagtaaaagccttcctgagctgaggctagacctctgagggagagaaatgttccaactgctgctgttacctctgaagaggcactttctggggctctgaaaaaattggtaaactgaaacaattactgctcctagggcaaggggatgttcttgggagaatatcagcaaggacagcaaacaaacaggaaaaggagatctattcttccattctcttgcctatgtttctctagtacctcccaatagcagtacgtagcaggatcccacttgaaggaacttggaaaacgtagcttgctgatccccatcacggcatcatagcaaatttatttcagagaaatgtggctaaagatcaagattattagtaaatcaatttttttacctaatttttaatctgtattgatttcttataacataaatatctgtggttacagagacctcagtattttctttttcttctgtagcagcatttcaatcttttttgaagttctacctctctttcactgctagttcacaccatgtgagagcaatggacctaatcatcatgggcagtggtcataatatgtctcaacctgcccaaaataaagatgctaccccattaaccatatgttttattttgtaatacgatcatgatccaacctagtctaatgagaaacttaactagaaattttgttggaattattgaggaaaacagtgttcattttctgaaaaagtagcttagctagtaagatataagctcagtgctactagtggccatcttgatgtggaacaatactgagaatatttcttcaggtaatcctacaagaaatgtgtgcaaaacagaaaagaggaagttacaatgagaaatttcttacgtactatattcagtagagcctcagggtagctctaaatctagatacttaataagaatactactgataataaataatactcatatagcaaatactatgtgctaagcattctttcatgtactttataagattaatatatctaatacaaggactgtatgagatagatattattgtccagttttattatgtcctgcaaataaaatgccctgacaaattatattctctcaatcatctttcctttgtttgcaatcaacattttatatgtattcacttattatgtatcactcctttgattcctcaaaatttatttagggctatataaatattttgctactactggaattagcaaaactttaaggttaaattttcaaacatgttattgccctcatcatactgtagcaagaattagtaatcaatgatacataaaccctatttatttatccaaattattccatttcacatcctcacaaaggacactattctgtcaccatttaaccctgttccccaaaatctcctcataaatgcagtttcaaaaacagcaaatagataaattggactttattaaaattaaatttttttttttggtgaaatggagtcttgctctgttgcccaggctggagtcagtggtgccatcttggttcactgcaacctctgcctcctgggttcaagcaattctcctgtctcagtctcccaagtagctgggactacaggcacgcaccaccacgcccggctaatttttgtattattagaagagatggggtttcaccatattggccaggctggtctcgaactcctgaccttgtgatctgcccaccgtggcctcccaacgtgctgggattacaggcatcagccactgcgcctggcccttaaaattaaaaaattttttttaaagtttttatttttttgagacagggtctcatcatgttgcccaggctggagtacagtggcgccatcatggctcactgcagtttcaacctctctagactcaagcggtcctcccacctcagccttctgagtagctgggactgtaggcatgtgccaccacatcccagtaagttttgtattttttgtattatagaaatgggggccaggcacagtgctcactcctgtaataccaacactttgggaggccaaagtagatggatcacttgaggtcaggagttcgagaccagtctggccaacatggtgaaatcccctctctactacaaatacaaaaattagctgggcatggtggcacgcgcctgtaatcccaactacttgagaggctgaggcacgagaatctcttgagtctgggaggtggaggttgtagtgagctgagaccatgccactgcaccccagcctggttgacagggcaagtctgtctcaaaaaaaaaaaaaagaaagaagtggggtttcaccatgttgcctagactggtcttgaattcctgggctcaagcaacctgcctgccttggcctcccaaagtgctgggattacaggtgtgagccactgcacctggccaaaattaaaaacttctatgtttcaaaggacatcattaagaaagtgaaaagacaacctacagaatgggattaaatatttgcaaattgtgtatctgttaagggtctagtatttagaatatgtgaagaactatcacagctccataagaaaaaaacaaataatccaattgaaacaatgggcaggccaggtgtggtggctcacgcctgtaatcccagcactttgggaggccaaggtgggcggatcacgaggtcaggagatcgagaccatcctggctaacatggtgaaaccccgtctctactaaaaatagaaaaaaattagctgggtgtagtggcgggtgcctgtagtcccagctactcgggaggctgaggcaggagaatggtttaaacccaggaggctgcagttgcagtgagtggagatcgcaccactgcactccagcctgggcgacagagcgagactccgtctcaaaaaaaaaaaaaagggcaaagaatttgaagagatatttctccaaagaaaatgtgcaaatggccaaataaacacatgaaatacacacatgaaaaggtgttgaaatcattattcattagggaaatgcaaataaaaatcacagtgaggccaggtgtggtggctcattgcctataatcccagcactttgagagactgagtcaggaagatcacttgagcccagaagttagagaccagcctgggcaacatagggagataggcgtggtttgagcctgtagttccagctagtcgagaagctgaggtgggaggatctgcttgagcctgtgccgtcgaggctgcagtgagcagtgatggcgccactgcactccagcctgggcggcagagcaagaccctgtctctaaaataataatgataataataataataatagagataccaattcacacccactagaatgactataataacttaaaaaaaatctcaaaaaaaaaaaacccaaaaaacaaaaccccaacaactgttggtgaggatgtggagaaatgggaacccttatagggttccttacttatagggatgtaaaatgatacagatgctatgggaaacagtctggcagttcctcaaaaagttaaacatacagttgccatatgacacagcagttccattcctaggtcatcccaagagaaatgacaacatatgtccatacaaatacttgtacatgagtgttaatagcaacaatattcataattgtaaaagagtgggaacaacctaaatgtagatcagctgatgaatggataaacaatacgtggtccagctgggtgtggtggcacacacctgaaatcccagcgctttggaaggccgaggcaggtggatcacctgaggttggaagtttaagaccagcctgaccaacatggagaaaccccatctctactaaaaatacaaaattagccgaacatggtggctcatgcctgtaattccagctacttgggaggctgaggcaagagaatcgcttgaacctgggaggtagaggttgcagtgagccgagatcatgccattgcactccagcctggtcaataagagcgaaactttgtctcaaaaaacaaaacaaaacaaaaacaaaaaccagtatgtggtccatccatacaatggagtattattcagccacaagaaggagtgaagtacagattcatgctgcaacatggataaaccttaaaaacattatgctgagtgaaagaagccacgaaagatcacatatggtatgatcccacttatatgaaatgtttagaacaggaaatccatagagatagaaaagagatcaatggtttctaggagatggggagggaggcaattgggaatgactgttaataggtatgggattctttttaggtgatagaaatgttctggaattagtgtagatggttgcaaaatgtgaatacgctaaaactactgaattgtatactttgaaatggtaaattgtatgctatgtgaattttatctcaattaaaaaaaagtataggccgagtgcagtggctgaagcctgtaatcccaggctttgggaggccgaggcgagtggatcacttgaggccaggagttcgtgaacagcctggccaacatggtgaaaacccatctctattaaaaaaacaaaaattggctgggcgtgttggtacatgcctgtcatcccagctactggggaggctgaggcacgagaattatttgaatccaggaggtagaggttgcagtgagccaagatcacaccactgccctctagcctggtcaacagaacgagactgtcttgaaaaaaaaaagataaattatggtatttgctttggaattaaataattagtaacctttagtaaggtttggtaaaggtttagtaacctttagttaacccagttaacttctgtgtcttatgtttgtctttgtactgaagtagttgaatgccactgacccacagaatgagttgccagagaattggagcaacattctgttgtgggaaagagaatactctgttctaccttaaaattagattcccagcatatcaattgaagggttttaaatagtgagtgatgtgtttcaatttatatttatattatatttacacttgatcttagccaaaagtctgagaagtgattttatattatatttataaagatcactttagctttctcctggagactggattggtagggacaaggtgacattggtgaacttggttagaaagtcagtcaagcccatgtgcagtggctcacgcctataatcccagcactttgggaggccaaggcaggtagatcatctgaggttaggagttcgagaccagcctggccgacatggtgaaaccccttatctactaaaaatacaaagattaggcaggcatggtggtgggtgcctgtaatcccagctactcaggagattgaggcaggagaatcacttgaactcgggaggtagaggttgcagtgagccgagattgcgccactgcactccagcctgggcgacagagcaagactcagtctcaaaaaaacaaaaacaaacaaacaaaaaaccagtcagtactctagggaagaaataacaatagctatattatgacatagtagtgagttgaagataactgaatagccaaaatatattttggagatagtttgatgtgagaggcgaggaaaagtaagtagtcatgtgtggctctttgtttctggctttaataactccagtagttctggaagagacttagtgggaaaattaaggacattttggataaattgagtttgtccaaatggggttgccaagtggagagttgagtaaatgaagctagagctcaggaaagatgtggaccagagttataagtcatatttatttatttatttattttgagacagagtctcgctctgtcgcccaggctggagtgcagtggtgcgatcttggctcactgcaacctccgcctccggggtcaagtgattctcctacctcagcctccagagtagctggtattacaggcgtgggccaccatgcccagctaatttttgtatttttagtagagacgggggtttcaccatgctggccaggctggtctcgaactcccgactttaggtgatcctcctgcctcggcctcccaaagtgtttggattacaggtgtgagctactgcgcccagcataagtcatatttaaaacaatgggaatgggtaggaacacctagggatagagtgtgggaaatagagtagggtccagtatacagctgtgccaaatttcacatgtacaggttagatagtggagtgggtcagttctattgagaatgccctgaaagtttgaataatgataagcacgtccattttaacatcatgaggtagtggtgacgttgtaagaggagtttcagtgtagtgggttgtcatgggttaaaacgttcagattgtcatgggttaaaacgtgaattggatatgaggaagtggagtgtgcaaagatagttttctgaaagttttacttggaagaggacaaaaaattgagactagacagtttgaggaggatgaaaggtcaagaattctaagctagtgataaaaatttcgtcaacatcaatgaataggtaatgtaaacacattaatcctgggatggatgtgagaagagcaaagaaaggagtcatgggggaatatcagctctaaaggttgagtagagaaggaaggagtgatctgagaggtggaaggaggagtaggaattatcatagaaactttaagcttcttgagggcttgtgactgtgtcatgttcatcattttatctgaagttcttatcaacaaagtagctttcagtaaatatttattaaatgaagacaaaaattttaagagccatctgcaatgtcaaatgtagcccacagttgaatgaatatgaggaccgggaagtgtcccttgattttggagttaagcagctgattgccaccttctgtagaacagcttcagtggagtctccatgatagaaataaatgccaggttgctgaggactaagcgtggatatttgttgagagtggagacagtaagtgcaaacattcttttcagaaagctttgctctttttgaagctttgctcatagggagatacaagatagtaggtagaggggcaggctgtgtttagatgagagagacttcagcatgtttatatgctaaatggaaaaaggaaaaaggaagggagaagttgaagatgtagaataaaggaggtgtgtgtgaatgattgtacattgtctttgaggttagtgggaatggagtgaagatactgggttgcagtacagatgagaatacagtttccactgaagtaggaataaaggaacaatagatggtgcagatggggaagtgtttgggtggcaagtgagaattctggatatcaacactttatttttttcagtgaaggggggataaggtcatccactgagattatagtggggatgaaatgatgattgtaggggactgaggagaaaaggagaatttcaagaaagcctctgagggaagtgagagggcaagctgagtgggaatacttagaaaaaatggaatcatggatttttcacggctgtggtatatatatttgtatgaatgatttcctccttctctcagggctcagcagcctgggtgagcacacaattgaacagttggattggtcttggcctgggttttatgcgtcagtgtgacagagagggtaaggaggcaagatatttcagtagcgagagtgtttgaagtggtgggccattgagtctaggctgaatagggaacaaatgacaccagaaggtggctgctgggacatgaagtggttggtgttcaagactggatagtggaattgaagattgaatgggaggagcagttgctgggtatgacagaatacaggatccagctatggagtgggtttatgaagtagagacaacgttcccaagtctttagtgaacatcagagagtgtcatctgttagaactttagctgtggccaggcaaggtggctcatgcctgtaatcccagcactttgggaggccaaggtgggcagatcacctgaggtcgggagtttgagaccagcttgaccaacattgagaaactccatccctattaaaaatacaaaattagctgggcatggtggtgcatgcctgtaatcccagctactcgggaggctgaggcaggataatcgcttgaacctgggaggtggaagtttcggtgagccgagattgcaccattgcactccagcctgggcaacaagagtgaaactcagtctcaaacaaaaaagaacttttgctcaaaggcaggtggtagcagataagaggtaaggaaaatttagtgaagaaaaattcagtttttaaaaacgttttaggctgggtgtggtggctcacgcctataatcccagcactttgggaggccgaggtgggcagctggcttgagcccaggagtttgaaaccagcctgggcaacatggcaaaacctcgtttctacaaaaaatacaaaaaattagtcaggtatggtggcatgcacctgtagtcccagctacttgagaagctgaggtgggaggatctcttgagcccaggaagttgaggctgcagtgagctgtgattgtgccactgcgctccaacctgggcaacagagggaaaccctgtctcaaaaaacccaaaaaaacaaaaaacaacattttattttggtgatggaattctctattgtttcgaagagttttgtttgttttaaagacattaaccagttttctcgagggatattctatgaaaaagtgggttccatcatccaataagtttgagaaactgcaaactctatcccgttggtaattcacaatgaacctcaacttagattaataaaggctctgggaaatgatgttactattaatgatttaacatttattgagcactgtctaaggctctgttctaaggctcccacatgcattattgtttccagtctttacagcaactatctcaatttaagtcacacggctaagctggaatggaagagctgggattcaaatccagaaagacttgctccataggattctcaagcctataaccagtatggaaacaggcttgacattaaatccagcatttccccatcttgtttggttatggaaccttattatcttttagtatttatagagagattagtcagttgtccacggcatggaccctgggaagtgtcgcctgagtcagtttacactggtgactacagtcttttaaacagcattgtttcagactataactagttttttctaacttggttctctgttgataatacttaaatgttatatttatttttctatttgagagccttatattttgacttcaaggcattttctattccctttcacaatgaccttcccaggaatcaaagatattgtcaccaccacacattacatttgagttactaaaacagtttataatccaaatagctatttcactttcctttctctggtctaagattatcttattgtaatttgttttttaaatttagagacagggtcttgctatgttgtccaggccagtctcaaactcctgagtagctgaaaatataggcatgtgtcacctcaaccagtttattgtaaaattttaatgtttagagatcttggagatcatcttttatttttaacagtatttatttagttttgcaggtagagaaaatgacagctgtgtagtgctgtggaaattataataattcatatccaagcttgaatgtcagctctacctctttactatagctgtggccttacaaaacctacttcgtttcttgaaacttgtttcttcctctaaaaagatgaggataatatcttgcagggtggctatgaaaattaagacagttcacacagtatctggcacatggaaagttctcaatgttaattacccatttttttctgtttaaggaaatagtctcaatcctataccatgaatgaattatgaaaatagttggaaaggaaacaacagttttaaatgtaaactgtctcagtcttatgctgacatcagctacatttctggtaaagtgatggtgtcatgatacaggttatattaagagttaaaaccagtttccttctggctttccaactgacataataagcaaaacctgcctgggcaaacatagacctatttattggctcacttattattaatgttaaagtagctttggtgctgacttctcctgttcttgttttaaaatttcactgttgtcatttgaaatctgacagaccttcagaagcttcatagaatgcttaatggtttaaatcgtctctagaacatgtgaagtatcttttccaaagtggttttctccatctgtcagtatgttcaaaatcatgtgtatagggccgggcgccggtggctcacgcctgtaatcccagcactttggaggctgaggcgggtggatcacgagatcaagagatcaagagatcaagaccatcctggctaacatggagaaaccccgtctctactaaaaatataaaaatcagctagccatggtggcacgcacctgtagtcccaactactcgggtagtcccaactacttgggaggctgaggcaggagaatcacttgaaccagggagacggaggttgcagtgagccaagatcgcaccactgcactccagcctgggcaacagtgcaagactctgtctcaaaaaaaaaaaaaaaaaatcatgtatataggacagaattgcttatattttcacatttactactggatgcctgtttggttttcatagcaatcaacttttggagtttatgggcagtacttaacatatataacctaagtgtggataattatttaaaataaggctattggaagaaaaatctatagggatttctcagttttcacaacaactccctgagcaaagaaaaaataggttggtttgagttgtatgtgatgagatttctaatattctatttgaaatgccccctagtaagcactagtgataggtattaatgagctgaatttgatttccagttccaactctgtcccttgcaacttctgtaaccttgaaggtttctctacgtttcagtttcttcatatgtaaaagagattaccaatatttccctcccaaggctgctgtaacagtgaagtgttgaggtttttatttatttattatttatttatttatttatttatttatttatttatttttttgagacagagtcttgctctgtcgcccaggctggagtgcagtggcatgatctcggctcactgcaagctccgcctcccaggttcatgccattctcctgcctcagcctcccgagtagctgggaatacaggcgcccgccaccacgcccggctgattttttctatttttagtagagatggggtttcaccgtgtcagctaggatggtctcgatctcctgacctcgtgatctgcctgcctaggcctcccaaagtgctgggattacaggtgtgaaccactgcacccggctgtgttgaagtttttaatatagccagcacagcatgtggcacatagtaggcacacagccattgcatgtttcttccagacatctcactgcatttttcagtaatattcttttcaagtacgttcttctttctcattccttaacatttaaaagctatattcaagagagaatattaatgtttgccaagtaaactgaaaatatttcctttgcagcccacacttaagagtgttttaggccgggcgcggtggctcatgtctgtaatcccagcgctttgggaggccgaggtgggcggatcacctgaggtcaggagttcgagaccagcctcaatatggagaaaccctgtctctactaaaaatacaaaattagccgggtgtggtggtgcatacctgtaatcccagctacttgggaggctgaggcaggagaattgcttgaacccgggaggcagaggttgcagtgagctgagatcacgccattgcactccagcctgggcaacaagagcgaaactctgtctcaaaaaaaaaaaagagtgttttagcaaaaaatgattttatgtatgacataccttggtttaaatcctggctttttaattgtaatttttttattttttgagacagggtcttactctgtggccaaggctggggtgcagtgatgtgatctctgctcactgcaacctccgcctcccaggctcaggtgattctcccacctgagccacctgagtagctgggagtaaaggtgtgctccactatgcctagctaatttttctatttttagtagagacagagtttcaccatgttgcccaggctggtctcaaactcctgggcttaagctatccaccagcctcggcctcacagtgttgggattacagttgagagccaccaagcccggcctgaatcctggcttttgaatgtaatagtgttgtgaccttaggcaagctacttaacctatccctaaagtattatgaggctaaagtgagtaatagtatgtataaaacatctagttcattgtctggtttgtatattcccaaaataaatgttattattttaagtggaaactgttgtttaatttgataattcatataattcatggcttttgagagcctgctctactcaaagcccgttaagagcaggcaggaacattgtgaacgaatgttgggcatattattatgcaagtgactgaatttggccttgcctgtaatcaggttcagcaaaagtggtattttctttctttctttctttttttttttttttaaattgagacagtctcgtcctgatggccagactggagtgcagtggtgtgatcttggctcactgcatcctccgcctcctaggttcaagcgattcttccacctcagcctcccaaggagctgggatcacaggtatatgtcaccatgcctggctaatttttgtattttttgtagagatgggggttttgccatgttggccaggctggtcttgaactcctgacctccagtgatccacctgcctcggtctcccaaagttctgggattacaggcgtgagccactgaacctggccaaaagtggtattttctattgcatttgaggtaacagaaattgatgggcttgttattgcatttggcatggctttttttttttccatgttgtctttctccactgactgtcaaaaaaaaaaaaaaaaaaaaaggctacattcatgagtgccacaagagagatccatgattcccaagtgctacagcagaccaaggtatattttggtatctaaaatgtttttcatcttttgctgatcttgtttattagaaataaatatgttactctcctgtattaaaatttaacacaatattggcaagctaaatttaatcaaatattctgcccattttaaaattcacttcctagcctgtccatccttccttttattttgttgtttgattttgttttattgtatgcttttagcagcctgaagccatggtttttagtttctgtctgtagtgataagtggaaaggagggatgaggaaggggctttactggcccaaccagaaatagaaactaagaacccaggactgtattatctcccttggacacccaacactatataaaattgattcctgccctggcagactaagcattggaaagctggtgctaagagtgttatgagaattcctaacaaatagaaaagctcaaggattgacactatagtaaaagatttcattttgacatgtttataatttacttatcaagttaacaataaggtgtttttatttatttatttttgtttatttttattttatgttttgagacggagtctcgctctgttgcccaggctggagtgcagtggcttgatcttggctcactgcaagctctgcctcccgggttcacgccattctcctgcctcagcctcccgagtagctgggactacaggcacctgccaccacgcttggctaattttttgtatttttagtaaagacggggtttcaccatgttagccaggatggtctcaaactcctgaacttgtgatccacccgccttggcctcccaaagtgctgggattacaggcgtgagccactgcacctggcctttttttggtatttttagtagagacggagtttcaccatgttggctaggctggtctcgaattcctgacctcaaggcctgccttggcctcccaaaatgctgagattacaggcatgagtcccagtaagatttttaaagggataccaaaataatcaacatttattttagaaggtgactttcttcaatgagatgtcaatgtctactttctgttatatagtgctattgtttcttttttcttttttttctaagtgagggtctcactctatcacccaggctggagtacagtggcatgatctcgggtcactgcaaccttcacctcccaggttcaagcaattctttcacctcagcctccagggtagctggaactacaggtgtgcatgcctcgctaagttttgcatttttagcagttgttggccaggctggtgtactgtttcttttattgactgagatctatatttacacagcatgaaagtctcagttgcattaagtacattcgcattgttatgcaaccatcaccattatctagttccagaattttgccgtcaccctaatagagcttgtatatatgtccccaccaaatcttatgttgaattgtaattcccagtgtttgaggtggggtctggtgagaggtgtttgcgtcatggggcagatccctcatggcatagtgttgtcctcgcagtagtgagttagttctcacgatctccttactccatccacctgcttctcctaaaactttgaaatacgcttggaattgaaagtgtttagtttagattgaggatagttatctaaaagtgacatacagggctcctgctttgctcttccttagtaaatttcctattttattacacagtttactaatacagaggacttgagttttgttatttccatggaaaacattattgaatctaaatttaactagagatgtgtagttcagggagggagagtggttttataatatgaatcttggatttgaaatgaacttaaagcaaatgaataaaaattgtttcattaattataatgtctgaaataatgcatgtttttgtgaataaaaattgatataataaagtttaaagtgacaggagtagatataactaattgtatttataatttcttggaagtaaaataacatttttgaaaaatattatacaatgacctcacatacagtgacctcacttaatctatgtgaggctatacacagtggctcatgcctgtaatcccagcactttgggaggctgaggcaggtgattgcttgagcccaggggcttaagaccagcctgggaaacatggtgagaccctgtctctacaaaaaatacaaaaatcagctgggcatggtgaggcgcacctttggtcccaactacttgggatgctgaggcaggaggatcacttgagcccaggaggttgaggcagcagtgagctgtgatcgcaccactgcactccagcctgggtaacagaatgagaccctatctcaaaaaaaagaaaaaagtctatgtggaagacaccacgttaattgtgttgggtggtttagagatgtttctgtctccttcactgatgaccgtgtgtctctgctgctgtcgctcactggtgattatcaactcaacctcttatatttgttttaacaaatatttatacaccctttgtaaatttgcatgagataaagtcattatagttaaaaaaaaattttttttttttgagacagaatcttgctccattgactaggctgagtgcaatgacatcatcatggctcacggcagcctgaacctcctgggctcaattgatcctcctgcctcagcctcctgagtagctgaaactacaggtgcatgccaccatgcccagcttgttttttattttttgtagagacagggtctcactatgttggcaggctggtctctaactcctgggttcaggtgatcctcctgcctcggcctcccaaagtgttaggatttcaggtgtgagccaccatgcctgtcctatgaagtcattacaaagaaataaaattaattggtttcattggcagtattgaatttcaaagcagaaggggtgcttaagagaaataatgcctttggagtaatttctgatgctagatgaaactcatatctcatttaaggtgtccatctgaattttatgtttggatgattgtgaattattccttaaagcttgaagtgaactctggctctctaggataaattaatctttattcctttaatctttattcccttagggatatattaaagggatcaaatttttttttagagtaatgtaaaattaagggacttcttttgttaggtgaatttctcaggttttaagatatcagtatcattgtggacattgactacattgtctactaaattctgtaattttaacttataattctcagtaattggctgggtgcggtggctgacgcctgtaatcctagcactctgggaggccaaggcggcagatcacctgaggtcaggagttggagaccagcctggccaacagggtgaaaccccgtctctactaaaaatacaaaaaaatgagctgggtgtggtggcgggtgcctgtcatcccagctactggggaggctgaggcaggagaattgcttgaacccaagaggtggaggttgcagtgagttgagaatgcgccattgcactccagcctgggtgacaagagtgaaactccatttcaaaaataaataaataaataataaaaataaaaatacaaaaattagctgggtgtggtggcgggtgcctgtaatcccaactactcgggaggctgaggcaggagagtcgcttgaactcgggaggcggaggttgcaatgagccgagatcacgccactgcactccagcctgggctacaagagtgagactctgtctcaaaataataataataataataattcttagtaatttttgcaatttttttggtacctaaaataatttctgttattgtgttggataactttgtcaacttcactttgggaatatctaaatacaggtagctgcattcgagccagaggaatattgggtttttttgttgttgcttatttttgaggcagccttactttgtcacccagactggagtacattggcacaatcatggctcactgcagccttgaccttctgggctcgtgtgatcctcccaacccagcctcccaagtagttgggactaaaggtgtgcaccaccatgcctggctaatttttaaatttttttgtagggatggaattttgctatgtcacctaggctggtttcaaactcctaggctcaagcagtcctcccaccttggcctcccaaagtgctgggattacaggtatgagccaccacacccagttgagaaatactgggttttaatcaagattattgtctgaatattgagtcttaatgacttttttgattttgtttttttggccatagtatgaagtttgctgttgataaccttctgtactaactagaagtagtatagaaactgcaaattaaaaaaaaaaaacccaggtaaaatgttgatggctgctatttttatttaaggtattaataaaggaaaagaagtcagggacattatggaggtcaagttttatattattaaaactcaacttcatgatttatacatacttagaaatagtctgagtgatgtgtgaccaaaatatgatttctaggaggaatgatagttacatccgtggaatagctgcgtacactttattgttcttggtgcttaaactttagttgtcctgctaagataaaggaagacattctttcagttggaaatcatgataatgtatttctccattgaaacagtatggtttgaacagtgctatatattcatactcattattattccttaaatgaatattttaagctcctgatagaaggcaggtactgtgttatatgctgtttgtgttaccagaatacgaagatgaagagaacaaagtattacacaattcctaatctcacataaatgctatttttttttactagctgtggggagcacaaaataagtggttgaaagtcatctgacacagttacatttattcctttccttttccatggctcttaggaataaattgttctactctatggattaaattgccctttgtttattgcctgggatcccaactttatttcctaattttatttctttgaggaaacgtttcacaagttttataacaaagtataactcaatttggagagcacaatctgtgcataagttggaggctacctattgtgaaatggaaaaatgcttgtcctagcattactgagttaatgtatagctggtagaaagttttcacttttaattgctaacttgcctagtgagagtgaaagattgattacggcaactaaaaagtataaaaactactgagtagtttttaggtacagtcagttcttcagtagaacaagaatcttttttttttttttttttgagacagagtctcgctctgtggcccaggctggagtgcagtggcgggatctcggctcactgcaagctccgcctcccgggttcacgccattctcctgcctcagcctcccaagtagctgggactacaggcgcccgccactacgaccggctaattttttgtatttttagtagagacggggtttcaccgttttagccgggatggtctcgatctcctgacctcgtgatccgcctgcctcggcctcccaaagtgctgggattatgggcgtgagccaccgtgcctggcttcactcagtgttttcagttaggaaacttacattgtttagttttgggacattttcttgaattatttcactggttttttttcctctctgttttctcccgtggattccccattgcatagatgctgaattatcttgactggacctccagttttttcttcttgattctgttgccatctctttgattccttattgtttctgataaattttcctaagtttaatttccgagagctctttggaaaagtatcgattttttttcatggatggagtatctactcttttgacacagggtcttgctctgtcgtggctcactacagctttgattgctcaggctcaagcgatcctcctgccctagccctcccagtagctggtactacaggcctgcaccgccaaacctagctaacttttttgatttttagtagacaaggtctcgctgtgttgcccagactggtctcgaactcttaagcgccaagcatttctcttgcctcagcctcctaaaattctgggattacagtgtagtatcttctgtatcctttccatggacgctaatgatggggtataaaattccttttatttatttattttttattgacatcagaaattcctgctaataaaattctttttaaattttaagtttttttcttcccacagttgtccgtgtttcctccaagttccttttctattttttgttttcctttgttttctttttgtggtagatgctttcctcagatgagtggtaatccttggctatttgcagttatgcctctaaaagctgattggaagctcttagtacctcattggtacttgttgactagagttcactctagggtgatctatctgtgtcatttgctggggcacccttcatgtcagcttctgattacttttcccttttctgaaaagggagagaggtcttttaatttcctgtctggtgggaggaggtctgtatgccacttctgtgggagagtgagggaagtagggcagtgaggatttcagtattcagtacatatgtgttttcttaaggcctctgttttcattaagcctcccccgcaccaatgtgctttatgtttccctgctctgaaatcctcctgagggaataatcctctagaattttgccttggtgggaaatgcatagtaacctaaccatgtggtatttaggaaggtactgagagattgagcgtttcctaaggagctttcagccagccttctttatttagtgctcccttcacacctgtttctacaggcgctatctgttaccagttcctgagccttttgaagattccgtggacgaaggttggtttttggctttccatactgctggtttcttggatctgctatgtcagttaccatttatgcatttgctttctagcttttaagttttgtttatgccttaaaaatacctgatgagggccaggcgtggtggctcaggcctgtaatcccagaactttgggaggtcgaggcaggtagactccttgcatctgggagtttgagagaagcctgggcaacatagcaaaacccgtctctactatagaaaaattaacccggtgtggtggtgcacgcctgtggtcccagctacttgggaggctgaggtgggaggatcgcatgagcctgggatgtggaggttgcagcgtgctgagatcatgtcactgtactccatcctgggtgacagaatgagaccctatctcaaaaacaaaaacaaaaaacccccaaaaaccttattagtattttagcacaatttggggaagaaatgaagttaaatatatgtatgttccatcttctctttacccagaacttatttctaatttttttttttgttaagcatcttttttgttgtggtaaaatatacataaaatttattatttataagtatacagttcagtgacattaagtacattcacaatgttttacagccatcactactttctagttctagaacttttctatcacaccaaaaagaaaccccatacccattaagcagtcactccccattccctccctccctcagcccctggaagccacaaatgtgctttttgtttctatggatttgccttttgtggatatttcatataaatgaagtcattcagtatgtggccttttgtcacatgttttcatttaccataatatttttgtggttcatctatggtatagcatagatcactgcttccttcttttttatggctgaataattttcattgtgtggatatatcacattttgtttatctgttcatcagttgatgaacttttgggttgtttctgctttttctggctattgtaaatagtgctgttatgaacactgatgtacaattttttggggtgaacatttgtttttattcttttaggtatatagctcggtgtggaattgctggatcatatatggtaattctgtctttaacttaatgaggaactgccaatctgttttcctcagtgactgtaccattttatattcctattagcaataaacaagtgtcccaatttctccacatttttgccaacactgttttccattaaaaactttttattatagtcattctagtgggtgtaaagtggtatctttttgttttgatttgcatttccccagtaactaatgacattgagccttttttcatgtgcttgttggccatttgtatatattctttggagaaatgtctgtttaagtcctttgcccactttaaattgtgttgtctttgtgttgtagagttgtaagagttctttatacattctgggtactagacatgattttcaaatttagatacatgattttcaaatcttttgcctctagatgttttttacttttttatttttgatccttgaactcatctatattctatggttgtgatgtaatgatgacagaattggtgtcatttgtgtttatttaccaggttatttggaaggattatattttaggtgctctcctctcccccagtaaatggtattacgacacaagggttataaaggactgataagaaattacttaagacagaaagggaagttggcctgcttccaaaatgtggtcccagcagaagtgaagttagttacaccaataactacagtcaaaaagctatttttaaccatgataatgtacttgttgttattaatattaaagattatatttttccaggtgcagtggctcacatctataatcccagcactttgggaggctcaggcggatggatcacttgagctcaggagtttgagaccagccagggcaacatggtgaaaccccatctctacaaaaaatgaaaaattaaccgggcttggtggtgcgtgcctgtagtcctagctacttgagagtctgaggtgggaggatagcttgagcccaggaggtcaaggctgtggtgagccaagatcgtagcactgcactccagcctgggcaacaggacaagaccctgtctcaaaaacaaaacaaaacaaaacaaaacaaaacaaaacaaaacaaaaccgactatatttctgcattaagtgggggtatggaatcctatctaatatttgagataataattgttatagtattttattgagcttttattgggtaccagatgtgttctaagtttttttcgtgaattattttcattaatcttattcattgttgtgtcctgaatgagtactcacatatttgttgaagggctcaatggtccctaaaaccttagatgctgttttggaaggttaacttgccaaaggtcacatagttggcaaatgatgaagctgagattaacattaagatctgattccaaagtagtctttcttaactgtattgctttatgtggagttttgccattgatgtctagacagaaaatctctagcaatggaaaaaaataatttttaattaattttaatttttttagtgttttgcttcttttttttttattttgtgagccaccgtgcccaattggtttcttttaaaagactagttagcttgtgctttaggcctcttgattaatctgaggtatttaattaatatctttgaaatcctaagatttactgtatcacttctgcaatatctaaatttttccttcttacttatttctgttctccttctacagtcctttctattatgtttaatcatcaaaacgttgttcttgttttctattgcaatctaatttttagtgttatgctgtttccagatgccatttgggtcattttcaaaaaaagatgagtaataattagcaagtaatgaatattgttctttttaccattcattaagaacaattgttaattgtcttattctattgtgaagaatatctgtaattcctgcttagaacctgggttgatagcaggatatcaggaagcactaagtgtacacagaacgatatagctggaaaaagtatatatgttaaagaataatatgttgtctaaggacagaatggaactgatcacacaggttcttttttggtaagcttcaaaacttcttatctcccatgaaagtactttttcttttataatatgcaacaataactttctgtttagttaattagttttaaaacaagcttaaacttataatttataaagaatcatatttgctccctatcattgttttatagctggggctatactgacaaataagaaaaataaaattcctgcccttgtggaggagacagttaaaaaatgagacaaatacatttcagatggaaatgaggacaatggaagaagagtagagcaggatgaaggcatgaagggtgactgagatctggtcaatctttagatagtgtaatacgggaaactgctttgaaaagatgacttttgagcagagatcttaacgtactgagggagtgaaccattcgaggtctggggaaagaattcagcttcctcttcagatgtacaaaattacaagatattgccattcttgtaactgaaaacctataaaagcaggataagaagtacggtttctaaaaacccatcgaagagctgaggatacaagggagcctaaatgaaccaactccagaaagtaatcaaactttcatagtggagaagaaacccatggttgctctaggatggaacaaccaaaggaataggaatccaccatagatgaggggaaaggagaaaccagccacatttttttaaaatcagatttttaatggccacgtatgggctggtttgacaggttaggatcctaagaagccctagcaactctggcaccaaagagcaagtatgcacccacactccagctcctacccacagatgttcactgaatgttcaggagtagtaagccaaaagcctgggccagtgatgaactggcatagataatacctgaggcatttggaacctctcccaagtatagggcaaccacccttagaaggcaggattgctgagaaaaatccagcagaggctctccaggctttcagttctggaatgctgcaggcaggggaagagctagagataactctcaccccacactctggcagtccatgttttcagccaccaaggactggggacagggcagaagaggtgagtgaaactgctctaattcatttcaggccttcacagaatgtaaggaagctgccctccagaaggctggctggggaggaggagcagggctgcacgagggcacctgagcttcagaaagcaaggtgtgcgactggagagcaaggagaatctagcaaaccaaactctgaccgtcgcgcttaatgcagagatagagttcctacagttttttttttctttcttttttaaaatataaacttgaatttttgaaacagtttcagatttaaagaaaaattgccaagatagtatggagagttcccataaatgctgcctctagtttttcctatttttatttaatttatttatttttttagtttttcctatttttaacaccttatattagtatggtatatttgttataattaatgaactaatactgatatattttcattaactaaagtccatactttatttacctaatgttttgggatcccatttagctgtcacgtctccttagggtcctcttggttttggcattttcttagacttgagcttctcatctcttgtttttgatgactgacagttttgaggagtattgttcaggtattttgtagaatgtccttctattgatatctgtttggtatttttgtcattgttacagtgaggttttgtatttttgggacgaagaacatgcaggtgaagtacaatttgctttcctttttttgagacagtgtctcactctgtcacccaggctggagtgcagtggtatgatgacagctcactgcagccttgaactcctgggctcacatgatcctccctccttagcttcctgagtagctgggactacagatgcatgccaccacacctggctaattttttttttttttttaatagagacagagtctcactgtattgcctaggctggtcttgaactcctaggctcatgcaatcctcccacttcagcctcccaagtagttgggactacagacatgtgccactatgcttggcagtaccattttcatcacatcatattaaggggacatactgtcaatatgactaatcagtgttgatattgaccttgatcatctggttgaggtagtgtttgtgtatttctttactacaaagttactcttttttctcctctgtttacatactgtactctttggaaggaagttacatatgcgcagcctacacttaaggcatggggagttatgatacccctcctcaagggcaaagtgtctatataaattatttagatttcttctgcatggaagatttgtctcttcttcctcatttatttatccattcaattttttaaatattagtatggacttatggatattttataccttgggttaaaatcttattattgctttatttattttattgttcaagttgttccagctttggccactgggagctctttcagttggtatgactttttgatataccactgtcagtgtatgtgtgtgtatgtctgtttgcactttctcactttctggcactacaagatgctctagtatatttagagactaaagcatgtagtatatgctttagtatatgctttatctagtatatttttctgtctcaatcctagaattagccatttctccatggagccttggttccttttactggagaatggagaaaccaagatctaggtgctaggtgtacatgttgctactggggtgtttttgcttgtaggccatctcagctgacagagccagaaaatgtatgtatttatactaccctgtatatatccacatatctataaatatttctatatgtatccatccgtatctaattaagctaaacatgagtttatattgatgtattaggttccagttgaatcactacatggatgattctaacttcctgcccttgcttatctgaaaactcctgctccaatagtgagaaatctgtctcctaccatcagccacccatttacttaatcattctactctagtatacatgtaaggtactcccacagttttaaaaactggtggcttggctatgaaacacaagcaggtctctgtaattttacctaggctcagatcccagacctgctcaagtgaaaggcttgatctcagtccttaaatatttgaagccagtgattaactgttaaattaaagctgcatcatagcccacacccagctcagttacatattggattgactcagactcccttctagtgtcctaacagaaaaattgtcatgtctttttctggaagtaaaatattacttaatttaataagtaatctatttttatataaaatgtctggtgtgtaatgaaaagttacaaggcacaagaaaagcaagaaaatgtgaccaaaggtcaagagaagaaatagtcagagatgatccagatttatcagaattatcagacagggatttaaagataattatgaaaaaaatgctagatgattgaatgataaaggttaacgatatgcttgaaaagatggggatttctgtagagtcatggaaattatgccaaagaaccaagttgaaattctattaaatagaggtgaaaaatatactagcagagaccagggaaaacaaaaaaaggaaagaaaagaaaaggaaagggaagggaggggagggaagggagaaagaaaaatacactagcagaaatgaattcattacatgggcttaacagtttatggacatagcagaagaaagaatcagtgaatatgaagacagattggaaagagaaaagacagaaaaagtcagggaggggtagaaaagagattttagatctgtgggataatatcagatggtctaacatatatgtaattggagtttcagaaggagagaagagaacgtggcagaagacatatttgaagaggcaatgctcaggaacttctaaaattgatgaggtcatcaattcacaaatggaggaagttcagcaaatcccaagcaagttaaatacaaaacaaaaataagccaacaaatttaaaaatcccatatataggcatatcataatcaaactgctgaaaactgaagatggaagagatcttaaaagcaacaggagagcaacaggagaataaaagacacattagttatgtgagaatggcaacatgggttatggctattccatgttttagggccagaaaaaaatggagtcttagctgagcatggtggcacatgcttgaacccaggagttcgagtccagcctgggtaaagtagtgagaccccatctctatttaaaaaagaaaagaagtccaggcacggtggctcacacctgtaatctcagaactttgggaggtgggcagatcacaaggtcaagaggtcgagaccatcctggccaacatggtgaaactgcgtctctactaaaaatacaaaaattagccgggtgtggtggtgcacacctgtagtcccagctactcgggaggctgaggcaggagaatcacttgaacccaggaggtggaggttgcagtgagccgagatcatgtgccactgcactccagcctgtcgacagagcgagactcagtctcaaaaacaaagaaagaaaagaaaagaaaaaatagaatgttaaatacaatgggatgacatccataaagagctgaaagaaaaaaaaaaaacaacctgttaacctagatttctatggccagcagaaatagccttcaaaaataatggcaaaataaagactttttggacatatcaaaaagggaaagaatttgtttccagcagacctggactcaaaaaacattaaaacatacacattaacaagatgtgggttttacagcatatatgtgattatacaaccatgaaagaacaaaaaggaggagatggaattatactgtcacacatttcttactctgtgaaaggagactgtagtaacttctggatgcatatgtaatctctagaacaagcactaaaaacacaaacagggataccataaagtcagtacatctgcccaagagggattaactgctacgagaatcattctcctactgtaaacagctagaaaacaggacaaaaatacatgaaacaactgttttcagacattggacaacaggcagcacaggatagtgatccctgagagaagggaaataactgatatgaaccctacaggggttcctataggcagtttccagattgtagcacagagtaggggaatccaaatagagcccaggagagtttggagaagtcaaggcaactagaatttgtggggcagaaaacaagaataaaaggaactacacagaaatctatagaagtaagagaatctttgattggacactcatctgcacatgtgaagtgtggaagtcagcaatgctggagaaagtcacactggaaatcagaacactgaacaattccaggagctcacacagagctgggaatagtttatgtttccattaggcatagtggagagactgtttcatacaaaggacattggctagagtcttcaaagtggggttaaattagctatagactaaaggcctttctaaacctaccctaagcttcaaggcaggttttgaaaggaccaggctgattctaagtaactcaattatgtgccaaaactaaactcttttaaagaatacagtaaatgccagcacctaacaattaaaatgttcagcattaataatatattaatgaaagattactaggcatacaaataaaaagcaggaaaatgacccataaccaggagaaaaatcaatagaaaagagacctagaaatgtggaattattagaaataattctgatgattgaattatcagccaaatatgttaatacaagtattataatgactagtagagaaatgaatgatagataaaaagacacaagccagatgtggtgaatcatgcctacagacttgagggtaggcagatcagcttgcccaacatggcaaaaccctgtctctactaaaaatacaaaaattagctgggtgtggtgggatgtgcctgtaattccagcttgggaggctgaggcacgagaattgcttgaacctgggaggcagaggttgcagtgagctgagaacatgccactgtactccaacctgggtgacggagtgagactttgtcgcaaaaaaaaccaaaagactcacaagtagtatctaaagatgaaaaataccagatataatatccaaaactgggggaaaaactggatgtgattaacagcagattagacactgcggaaaaaaagatcattaaatgtgaaggtatagcagtagaacctattcacactgaagcacaaagagaaaaaaaatactagaacaaagttaatagaacatcagtaaccttgggacaatagcaagttgcctaatacatgtataattggagttccagaaaagtggggaaaggtagaaggcaattactttaggaaacagcgtctgggtggccaggtgggtggctcacacttgtaatcctagcactttggggggccgaggggggtgcagatcatttgagatcaggagtttgagaccagcctgtccaacatggtgaaatctcttctctactaaaaatacaaaaattagctgggcttggtggcatgcgactgtaatctcagcttcttgggaggctgaagcatgagaattgcttgagccagggagatgtaggttgcagtaagccaagatcatgccactacactacagcctgggcaacagagtgagaacctatctcaaaaaaaaaaaaaaaaagaaaaagaaaaagaaaaagaaaataagaaaatagtggctcatcatggtggctcatgcctgtaatcccagcactttgagaggctgagatgagaggattttttgagcacaggagttcaagaccagcctgggcaatttccttaaaaaagaaaaagaaacagtgactataaattttccaaatctgatgataaccataaactctcagatccaagaaactcagtgaactctaaatagaataaacaaatataatcatacctaggtatgtaatgataaaattagtgccagtcatggtggctcatgcctgtaatcctaacactttgggatgctgaggcccggagtttgagaccagcctgggcaacatagtgatacccctatgtctacaaagattaaaaaatagaaatataaaaagttagctaggcatggtggcacttgtctgtaatcccacttacttgggaggctgaggtgggaggattgcttgaactcacgaggtcaaggctgcggtaagccataattgtattccacccagggtgataaagcatgacgggagatcctgtctcaaaacaaaacaaaaccaaaaaaaggcgaggcacagtgactcacacttgtaatcccagcattttgggaggtcaaggtaggatgatcgcttgagcccagaaattggagacaagcctgggcaacatagtgagaccctgtctctcaaaagaaagtttaaaaaggcgggcatggtggcatgggcctgtagtcctgtctactcaggtggctaaggtgggaggattgcttgagcttgggaggttgaggctgcagtgaactgtgttcgtgccactgcactccagcatgggagacagagcaagatcctttgtcaataataacacataaaccaatgttacaatgagaagaaataaattctggtgttcggttttttgttttttttttttctgagatggagtttctctcttgttgcccacgctggagtgcaatggcatagtcttggctcactgcaacctccacctcctggattcaagatgattcttttccctcagcctcccaagtagctgggattacaggtgcatgccaccacacccagctaattttcgtatttttagtccatcacgttagccaggctggtctcaaactcctgatctcaaattctggtgttctattgcacagtggggtgagtatagttaagagtaaaatattattacaaaatagctggaagaggggcttttgaatgttctttcacaagtgagaaatgcaggaggtgatggatacactaactgctctgattggatcattatgcaacatggatatgtatcaaaacatcaaattgtggcccggcgcggtggctcatgctggtaattccagcactttgggagtctgcggtgggtggatcacctgaggtcaggagttcaagactagcctggccaacatggcgaaaccccatctctactaaaaatacaaaaattagctgggtgtggtggtgcatgcctgtaattccagctactcgggagactgaggcgggagaattgcttgaacctgggaggcagaggttgcagtgagctgagattgcgccatcgcactccagcctgggcaacaaagcaagactccatctcaaaaaaaaaaaaatcaaattgtaccccataagtatgtacaattacaatatgacagtttaaaaattaaattaaaaaaaaattctcttgtacttaccagctgaataaaaaataaatttttaaaaggagagaagtcttcttaaaaaccagttatttaccccatcattaagttataatgaactttcttatgggaattctttgataaggaagctcctttatgctgaagttttattcttttcatacctctttagataaatcagtgctttaggagcatatgtcatatgactcaatggcagtgttctaacttggattctagctccacattgtgcaaaggcaaaaaaccagagagtcagtgtggtagttaagaacttatgttctgctgtttgatttcctacatgccagtactccctccactacctgcagtcttcctgacctggggcaagttccttttgtaaactctgttttctagggggatggtggtggaagaaggatggtgatttgagccaggcagtagcaggtagaggtggagaaaagtggtcaaaccctgaatgaacgttaaagataggaccaaaaggatttgatgagaaattggaagtagagcacagggaaaaagaaagatatcagtgatgatgccaaggtttttggcctggggaattgggatagtggagttgttatttgctgagtatgacttttcacaaaggaatgtcaaggcataagtagcaaagttcttttttttttttttttaatttttcttgattgtgtttgttttgtttttcatcttttgtgggaggtgggtggagatgaaagcaagcacaggggttggcaggcatacccctggcacctacctgtgagttcatgattactagttttaaagttcagtcctttttatttttacttttttttttttttttttttttttagagacagtgtctcactctgtcatccaggctggagtgcagtggcacaatcacggcttactgtagccttgatctcccaggctcaggtgatcctttcacttcagcctcctgagtagctgggactacaggcacataccaccctacccagcaatttttttaaaaaattttttgtagcgacatagtcttaccatgttgcctagactggtctcgaactactgagctgaagcaacctgtctgcctcagcctcccaaagtaaagtactgtaattacaagcttgagccaccgtgcgtggccaaattctggccttttgatgttgcatggtgtggatggggaggcaaagtgtgatattttaggaatttgaggatttcttcttcgaccttaggcgtgacattggacaaatgacatctgggctgagacattttctagtaatgctggatccaaaaaactcttatcccattgtctcatagcttcattacacagacctggcggccatgatcctctttttttcccccttagttgccaaacatgggttctctgtcttacctcatttgagtcttacctcagtcttgagagtctcaaatgtgtatcatagtttttagacaaaattcaaccttatttcaattagtatttcattgttatttaaatattttaacaggaaaactgagcaatgtttccctttacctgttaatcctgttataatattttagataaagtgtattagaaggcacattcttcattaatagaatatttattcatgtgtttatatggttcttaactaggaataccatatagtctatctccaaccctttgagaaggaaaaaagatcctgactaaacaggacaccagaagggcatgcctaaactaggactgttctgggcaaatcagaaggcatgttcaccttattctttttattctttctttttctttttttttttttttttgtgacggagtctcgctctgtcgcccaggctggagtacagtgacacgatcttggctcactgcaacctccacctcccaggttcaagcgattctcctgcctcagcctcctgagtagctgggactacaggcacatgccaccatgcctggcaaattttttgtgtttttagtagagacgggggttttgtcgtgttagccaggatggtcttgaactcctgacctcatgacctgtccacttcggcctcccaaagtggtgggattataggcatgacccactgcacctggcctcaccctattcctaaggccagaaaaccagctagagtaaagttcactttctgtttgagtgcttggactttattgggagaaggcaaatgccctggaacaagagtgaaagggagaaattcccgttgtattgcaagccagaataagagaggctcacccacactggcctaaggcatctcagttgttgatgagaatgtgattacagatgtctcacatgaataccaaagacaattgcaaaggaaattaaaagttatgcaaagagagtcgagaagtcagttgtctgctcacaggttggctttagtggctattactttgagatactaaatgagcgatagctttaaacttcaactgcttttgtttctgaggaaaaaaatcatcttatatcctttcataagtcgcataaaaagtggacattttctattattttaaagagtaaatttaggtacaagcatttactaatttttttttttttttttttttttttttgagatggagtctggctttgttgcccaggctggaatgcagtggcgcaatcttggctcactgcaagctccgcctccctggttcacgccatgctcctgcctcagcctccagagtagctgggactacaggcgcccgccaccacgcccagctaattttttgtatttttagtagagacggggtttcacccttttagccaggatggtctcgatctcctgacttcgtgatctgcccgcctcagcctcccaaagtgctgggattgattacaggcgtgagccactgctcccggcctgtaattctttttttttttgagacggagcctcgctctgttgcccaggctggagtgcagtggcgtgatcttggttcactgcaagctccgcctcccgggttcacgccattcttctgcctcagcctcccgagtagctgggactacaggggcccaccaccacgctcggctaattttttgtattttttagtggagacggggtttcaccgtgttagtcaggatggcctcgatctcctgacctcgtgatccgcccgcctcagcctcccaacatttagtaattcttaaaagagttcagcatgaatatacacagtacgtgggttattagtactgtgttgttaacacaaatgaactatgatagcaaattgaatttggttcaatcaggtcaaagaataaaaggatgattttctttaaccaccagcaaaggatagtataatgaaccccatgcaactatcacttaacttcaataatttcaagtttgagtaagttgcagagtagtaatttgaacccacatctctcttgttccaaatcccttgcttttaattacaatcccatgtggcttctttgtcatttgatgctattgagcaactttatgatttttttggtgtttttggtaaaatagacatgaaaaggcattactacagggagttttttcactccctggtaataagaggggaaaagcactctcttttaatgatacatgttttgtaataagcattttttttagttgcagtgttctgcaaagacaaaacctgctgatacagttcatcctgttttagaaatctttgacccattcatcagactctgaccactctaaagataaaggattatggttgtattggtttttccgactgaagcggccttctgcagattgagaaattgtataattattaactgcggtaatggagatgtacttgcaagtttcatctggtatcttaatgacctttaaccctctgagtacacctaaaacatatcctagaattattgaaattaatcagttgtccataacttttctgtctgtataatttggctatcatacgtattttgtttccccctgcccttgccagtttccatcctcctactcacatactcacaactcctataaattggagtatttagtagcagtagcctttggtataaacactttttaaaaatttactattttttgaattaatagggccactttctagtcaagtttttttttttttggggggggggtaaggagggtagggtaacagttccacacttacaagggtatttgtttagaccaagcttgttcaacccacagcctgtggggctgcatgtggtccaggatggctttaaatgcaactcaacatgagtttgtaaactttcttaaaacattatgagttttttttgagaatttttttgagacagagtctcgctctgttgtccaggctggagtgcagtggcccgatcttggctcactgcaacctccacctcctgggttcaagcgattctcctgcctcagcctctggcgtagctgggattacaggtgtgtgccaccactccaagctaatttttgtatttttagtagagacggggttttaccatgttggccaggctggtctcaaactcctgacctcaagtgatctgcccacctcggcctcccaaagtgctgggattataagcatgagccaccgcgcccagcctgcgatttttttttttaagctcattagctatcattagtgttaactgtattttatgtgtggcccaagacaattctccttcttccgttgtggcccagggaagccaaaagattagacacccctgatttagacaaataagtgaaggcacactgaaataacagttatatataataaccttgtgccacccagcgcggtggctcatgcctctaatctcagcactttgggaggctgaggcgggcggatcagctgaggttgggagttcaagaccagcctgacttacatggagaaaccccatctctactaaaaatacaaaattagctgggcatggtggtgcatgcctgtaatctcagctacttgggaggctgaggcaggagaatcgcttgaacccaggaggcagaggttgcagtgagctgagatcgcgccattgcactccagcctgggtgacaaaagcgagactctgtctcaaaaaaaaaaaaaagaaaagaaaagaaaaaaaaaacacaaaaaaaccttgtgttttgtggatctcacattcatctcagatatttcttgccctgggagatcctctgaattctcaggactgcttcgtgtcatccctttatgctctactatcttcccttgcctagaaggcaagtagggctttgaatctcgcctttgattctactgtgatcctatcaaatatagtaatgctagaaatataggtctgaagtttgggagagagattggctcagtatagatatgtaaagcacagctggatatgtagtagttatatgaatgggattggatgaaattctctagaggtgtgtggaatggaaagaggtggcccaaggaggaagagagagagagagaaattggagaggtagaacaatttaggaaagagtaatgttctagaaactaaggagagagtttcacaactgcagtggtgaagcactgtgagttcttatttggcaatttggacttcattattgtcttatcacagataggaaatgaaaggttgcagaacatttaggagaaaatattaagtgaggacacagaagcagtaaatgtcgtatatgccttttaaacattttggagattacccatagtaggcctgtcccttgggtaaggcaattagggcagctttcctgggccctattttggggtggggaatgactcggggactttattatatgactttttttctgaacattaataaaattcagttccaaaattttgtgattaactgtagtcctaagagcctatgaaaaatgcagataatgggcagttccacattggttgaactgccccaggcttctctcttctagagatgctgtcccttccttttaatcctgtagtagctcctatcacttttttttttttttttttttttttgagacagagtcacccagactggagtgcagtggtgtgatctcagctcactgtaacttctgcctcctgggttcaagcgattctcatgcctcagcctcctgagtagctgggattacaggtgcgtgccaccacacctggctaattttcgtatttttatgggattttaccatgttgcctaggctagtcttgaactcctgacctcaggtgatccacctgcctcagccgctgaagtcctgggattacaggcgtgagccaaggctcctggcctcctgtcactttttacaattgtcagtttgtttttcctctcagaaattaagctccttaaagctctctattattgttttgaattcccagggcctagcataatgcccagcacgtaatgttgagtgtttgttatgtgagtgattgaaggaataatccaatacatatctgtcttaagtacaaaagaattccaatatggtggtctcacagagtcaaaaaagcggaatgtttcagaaaagagggattgataaacagtttcaaatggtactaaaagtattgaaaactgacctttggatttggcttctagaaggtcattggtttccatagtgaaaacttttatagcaaaatggttggagtagaagtggttgaagattaaaggagaaatgagatgtaagaaacaacaaacaagtttgtgggggcgggggggttggttttatttttaaagacttgtagctgagcgtgacagtatgtatctgtagtcccagctatttgggaggctgtggctggatgatagcttgagcccagcagcttgaggctgcagtgagccatgattgcaccattgcactccagcctgggtgagagagagagaccctaactcaaaaaataaaataaaataaaataaaataaaataaaataaaataaagatttgaagctaaagggaagaaaccattggagaagaaagccaaagatctgatggaggagaattcattatcatggtaatgttatgcatttgatttgcatatatctaagtattcccaccaacatgttttttttttttttttgagacagagtctcactctgtcacccaggctggagtgctggagtgcagtggcacgatcttggctcactgcaacctcccgggttcaagcgattctcctgcctcagcctccctagtagctgagactacaggctggtgccatcacgccctggtaatttttgtgtttttagtagagatgaagtttcgccatgttggccaggctggtctcggactcctgatctcaggtgatcctcccacttcggcctctcaaagtgctgggattacaggcgtgagccaccacgcctggtcccaaccaacatttcaagataatatatttctccttccacttgggtttgatatattaatgtattttgaacttgaaggcttttgctgtgctatttggggcccctagtggtaaatctaataatgacatgcaatagaacagctaatataccagttattccttatgaaggttattctttctatgaggattaaatgaggttggaatatgtagttatagcaatagtagtgattcttaatcatttttttaaaaagagagtctcgccaggcacgttggctcacacctgtaatcccaaaactttgggaggccaaggtgggtggatcacttgaggtcaggagtttgcgaccagcctggccaacatggtgacaccccatctctactaaaaaaaactaaaattagctgggcgtggtggtagacggctgtaatctcagctactcggtaggttgagaattgcttgaacctgggagacaggaggttgtagtgagctgagatcgcgtcattgcactccagactgggtgacaagagcaaaactctgtctcaaaataaataaataaagggtctcactttgttactcagactgaagtgcagtggtgtgatcatggctcactgcaatgtccgcctctcaggctcaagtaatcctcccacctcagcctccctagtagctgggactataggtgttccaccactatgtccagctaattttaagaaattttttagtttttaaatttttttgtagagatggtggtcttactatgttgtccaagctggcctcaaactcctggtctcaagtgatcctcccacctcggcctcccaaagtgctgggattaccggtgtgagccaccatggctggccaaaaatgagtaatttttttttttttgagatggagtctctctttgtcgcccaggctggagtgcagtggcgaggtcttggctcactgcaacctcctcctcctgggttcaagcgcttctcttgcctcagactcccgagtaactgagactataggcacgggccatcacagccggctaatttttgtatttttagtagagatggggttttgccatcttggcctggctggtcttgaactcctgacctcaagtgatccacccccttggcctcccaaagtgctgcgattacaggcgtgaaccactgtgctctgccccaaaatgactaatttaaaggtgactgtaatatagttaaacaaatgcctcttttcccattctttactaacttgttatttaaatggggcaagtttttacaacataagaaacaggccaggcgcggtggctcacgcctgtaatcccagcactttgaaaggcagaggcgagtggatttcttgaggtcaggagtttgagaccagcctggccgacatggtgaaaccccgtctctactaaaagtacaaaaattagccgggcatggtggcacagactgtaatcccagctaatcagggggctgaagcaggagaattggttgaacctgggaggtggacgttgcagtgagcctagatggcaacactgcagtccagcctgggcaacagagcaagactccatctcaaatgaaacaaacatactaaaaacctattaacttgtttgatgtgagtgtgcttagctttatttcccttaaagagagtctttttatgagatggagtctcactctgttgcccaggctagagtgcagtggtgcaatctaggctcactgcaacctccgcctcctgggttcaagcgagtcttctgcctcagccttcaagtggctgggactacaggcgtgtgctaccacgtccagctaattttttgtttttagtatagacggcgtttcacgctgttaggcaggatggtctcgatctcctgacctcgtgatccacccacctcggcctcccaaagagctgggattacaggtgtgagccactgcgcccggcctaaagagagtctttaggtgaaaaatttttgtgaatattgtgatttctccttaataatttcttgtgtatttatgaattttatataattaaatggcatatcaaaaaaatcacctatgttaattatgtttttgactcagttatattttcttttggtacattattaagttaatatccatatgcaaaaatatgctgacaatatattaattttggatttttcatttttatcagaaatcatgagtggaggatctcaagtccacattttttggggtgctccagttgcttcactgaaaatgacagtatcagaagacacagcttctttaatgtctgttgctgacccctggaaaaaaattcagcttttatacagtcaacattctttatatctgaaggatgaaaaacagcacaaaaatcttgaaaactatgaagtcccagattctattggttctccagatctttgtggtcatttcttagcaaactgtatgaatagacatgttcatgtgaaagatgactttgtacattctgtttctgaaacacagaatatagaatcccagaagattcactcctctagactgagtgacataactagctctaatatgcaaatatgtggatttaaaagcacagttccgcatttaaccgaagaagaaaagtatcaaagcttctcagtgaaaataaaattagagatgaacagcctaaacatcagccagatatatgtggtcagaactttaacacaaatttgtttcagttgggccataaatgtgcagctgtgttggatttggtttgtagtactgaaaaaattaatatagggcctgaagtggtacaaagagagtgtgtgccaacagaatatcatgaaatacaaaaccagtgtttgggattattttcctcgaactcagtagataagtcaaggtctgaagcagcagttaagaaggtctcagaccttaaaatatcaactgataaagaatttctcagtataattacctccagccaggttgctttttttagctcaaaagaaagataaaaggcggagtcctgtaaataaagggaatgtaaacatggagactgaaccaaaggcaagttacggggagataagaatacctgaagagaattcgattcagcttgatggttttacagaagcatatgaaagtggacaaaaccaagcatattcccttgaactttttagtcctgtttgtcctaaaacagaaaatagccgcattcacataaactctgataaaggtcttgaagaacatacaggatctcaagaacttttcagttctgaagatgaactgccaccaaatgagatacatattgagttgtgtagctcaggaatactgtgttcccaactaaataccttccacaaaagtgctattaaaagaagctgtacctctgaagataaagtgggccagtctgaagctctatctggagtccttcaagtagctaagaaaatgaagttgatttctaatggaggagattctgctgtagaaatggatcggagaaatgtgtctgaatttaagagtattaaaaaaacatcattaataaaaaactgtgattctaaaagccagaagtataattgtttagtcatggtgctatctccatgccatgtgaaggaaataaacaaaattcggaccaaattctggctctaaagtgcctttagcaacagttacagtaagtgatcaatcagaaactaagaagaaggtttttctgtggaggactgcagcattttgggcatttacagtgtttcttggagatataattttactcacgggtgaggtcattatggtatagtggtagcttattttataaagctaagttttgtttgtttttgtttttctcccacttagtctttgaagactctttctttagtcatttgcctcttctgagctcagcataattgatccctttattgcatctgcattgctctcctttccattgtccactctcctgcccattgccacttctgggcctctgttctatccttctcagctctgccccttctttccacttatcccctcctttaataagccttccctagtcaggtggagtgggtcacacttgtaatcccagcactttgggaggctgaggcaggaagattgcttgaggccaggaatttgagaccagccttggcaacacagaacccgtctctacaaaaaataaattaagttttgcgtgcctgtagtcccagatacccaggaggctgacatgagaggattgcttgagcccaggaggttgaggctgcagtgagctttgattgggccactgcactctagcccgagcaacagagttagacctttctgcttctttacctaatgtctaataatgctgtgcacattgtgtttttactgtgggaacagttattgatttctgttgccttattttattatcaaaattatattaattacacttggaaatatggaaaggaaaaaactggtattataccaacttcatataaccaccaatagagttcgagagtgttgccttccagttattttctctgttctccttaaaatgtgtgtgcatgtgtgtatatatcacacatagaagctcatatttattgggagcttagtttgtgagaccctgttttagattttacatgcatatttcattacaacaagtatatgaggaaggtactgatttttatccccacttttcagttgaggaagctgaagcccagagaagtaaagtaacttgtccaatgtcatacatctaggaagtggcaaagctatagtttctcctagactccagaatttatactcttactatatagttgtaaccataaagaacattttgtttttttaatttttaatttatttatttttaagagacagagtcttgctatgttgccaagtgcagtgggtactcacgggcacaatcccattactgatcagcatgagaatttttgaattgttatttttaattttttgtttgtttgtttaataaggacaggatctcactgcattacccagtctgatctccaactcctgggctcaattgatcctcctgccgcagcctcccaaagtgctaggattacaggcgtgagctaccgtgcccatggtatttttaacatgcccttgtttccaacctggaccagttcacccctccttagggaacctgtggtcctccactcccaggaggtcactatattgatggcaagcttagtgcaaacacctgatcggctacaactctgaactcctgggctcaagtgagcctcctgcctcagtctcccaagtagccaggactacaggcacgcatgccgctgcacccagagagaatatttaatttttttttttttttttgagacagtcttgctctgtcacccaggctggagcgcagtggcacaatcttgactcactgcaacctccgcctcctgggtgcaggtgattctcctgcctcagcctttcgagtagctgagattacaggtgcaagccaccatgcctggctaatttttgtatttttatagagacggggtttcaccatgttggccgggctggtttcgaactcctgtcctcaggtgatccgcccacctcgccctcccaaaatgctaggattacaagtgtgagccaccgtgcctggccagaatatgttttcatcgaacacatctaacattgtgttacgtgttctttgttgatttaaaattgacacatggtgtattagagcaggaggaagttgattaagcttaataaaatatctaaagaaagaatgtgatacagaggcggtatttagaaaaagaaaacttcgaagcaatattgatagtcctaccaaatagtttacaggaggaatgagaaccttagctaatgtacttggtgttcctgtaggattgtcaagtacaatctttttttttttttttttgagacggagtctggctctggcacccaggctggagtgcagtggcgcgatgtctgctcactgcaagctccgcctcccgggttcacgccgttttcctgcctcagcctcccgaatagctgggactacaggcgcctgccaccgcgcgcggctaatttttttgtacttttagtagagacagggtttcactgtgttagccaggatggtctcgatatcctcacctcgtgatctgcccgcctcggcctcccaaagtgctgggattacaggcgtgagccaccgcgcccggccgagtacaatcttttataaagaagtaaacacaaaattgtaatgaacaggcttagcatagccacatcccactggcagtattagctaatattatttatatgtgattatattattggaggttcaattcacctaactccctctgttctgattcagtgcttgctgaatacctctttgcttgtgatttggctttctagttgtagagctgcccacagcatgagaacaggctgaaatactgtttttttggggcaattattgtaaatgaaaaaaaaatgtttttttttctttaatttgtttcattaattgatttagtatgagcttatgttgcagagctgaaatctagttttggagtgttaacaaaattaagtttcccagactgtaaaagagggctggatcctggaccatggtcattttaccgaggcaattaatgtcagcagggacctctcaggggccttttcctttttcctaggtaggtgtaaactcaactctgcaatctctgtattttttcctaacatctctatagttgttaacgactaggtaacattctctctggtggctgtaatgcaatttacttaaccattttcctattataagacatttagatgatttctatgaacatttttttaaaaaatcagattttttttgtctttttaagaaaaagaggatctagttcaccgatttctgaataagtttcttttgtgtggaacagatggaaatgttgggaaaaaaaagaaatctacacttttctgttgtcctaatgaggcagtgaacttagttggatagcttgggtagtttatactacctattgatatatacccccaaacagaaatcttcctttttttttttttttttttgagatggagtcttgctctgttgcccaggctggagtgcagtggcgtgatctcggctcactgcaacctctgcctcctgggttcaagtgattctcctgcctcagcctcccaagtagctgggactacaggagcccgccaccacgcctgactaatttttgtatttttagtagaggcagggtttcaccatattggccgggctggtctcgaactcctgaccttgtgatctgcccacctcggcctcccaaagttctgggattacaggtgtgagccagcgcgctcggcccatactgaaaaatttgaagtaacagatgtattccagaccttgttgaataccaacacagtagacagtttgctattataacttctagcaatagaatgaagagatgccaaaaataaggattacctaagggagactactgactagaattagaagaagatgggaggcttaacattgggaaaccacagtgtttaaaggacaaacagaataaggactaggagctggggcatgtcagtgagagggtaggaaggagccaggaggccagggtgggctacccatcccctccatgcaccactagtgattaccatgtcactaatccaacataggcttcacagtcctagctttcagaatgctctccttgaaatttcttgtctgttccttttttctgaagaacatgcatcctgaatgttggatcatgaaaagtcttgaatgctgtactagctcttcctggctaggcagtggggaaccactgttttttagtaagtcacctgaactcattaatgctctgatatatcactcgcctgaactcattactgctctgataaatgactcattagcattgtaagaaatgggttgcaggcgggacaagcacctgttgggagggaaaggaatgtgtaatgtaaaacagtagtagtggtggggcatgggcacatttaagcagcagaggggtaggtgggagctggtggcaaggagtgggaagggagaggcaagatgacttcagattttagtttacttgattagcagcatagcatcaataaatgagttgggcgctatgaaaggaaaagcagatttggacattgctgagtttggggagccaatggaatatccaggtgggaatttccattaggcagttgtagataaaaggttcaaaagctgaggaaagggtctggaatctaaatctgtaagtaatcacttggaatttatacatccttggttttctttcctattatctctaaattatttcactattgttaatatatgtttatacctctgacactgtatgctgattagatcctgccttagagatagctcccttcccctctttctctttacagctcacatgttttgctctacctacaattgtttctacctgttggtatgtttagttctacctgattctactctatccgtcttagatatacagctctctctttccaattggaaaatgttccctacctccaaagtctttcacttttaacttatgtggaagataattatcgtgctatttagggaaaaataatcaagtgtgttatattcagatatatttatagtagaagggaccagtgcatactgaatattattactctcctaggcactacggctttggaaccactactttgccttctggtcctaaaaaaaattatttttgatgtatcagaaatatacatgataacattttccttatgtaaataaaaactattaaaccttttttatatagagcagtggacttccatactgctatcatttgaatataaagaagaaattttgttaatttacctagatttagattttagatttgctgttttgtcatttcgtgcccttaggcaggttatttaacctatttgatctctagttgcttggtatatgggaggcatgcataatattttgctgtgactagtaggttaaccacattgtgaaggaatttatggcatgatcagaatgttttttctctctctagatgttgttattcatgaggaccaatggattggtgagacagtactacaatcaacatttagcagtcagttattaaatcttgggagttattcatctattcagcctgaagaatgtaaggcacattttaaatgaagtaatgtattagtgtttaaagtataaaaacatactaggaaagattagggttaaaatggttcttttacaaaatgttttctaaacagttggagagtattggtttcttttcattagtaagaatgaaaatagaattttaagaaatgaacttgtacattgtaaatcacatttattttaagaagtattgggtctcatgtttcgttttcttaggctgtcagtatagtggtggttcttcaccttttagggagtcagagacctctttgagaatctatagaccatttctccagaaaactggacttatgtagataggcacaaaattttgcttataattctaaagcattccgtggacctctgaagttcttctgtggaacttctgagcctctgattaagaatccttgaggtaataaaaatgtattggtctcgtattcagacagctgtggtttgaatccttattctcctgtctaccactgctaagaaaagctatttttcttctttaatgtccagttttctcttctttaaaagaagctgtttaatgaggaaactagcagctatctcctcctctaggaaataaaataacataaaaaaaaagaaagaaaacaaagtaagggaaacagtataaacttgtggttttggtcactggactcagatagaccaggatttgaatcctggccctcttacttccagtctttgtctttaggcaagttatttcacttcactatacctttatctccttttctttgaaatggagataaaaatacatatataccttatagggttgttatgaagattaagtgagaaaatgaatataagatgttgaacctgcacataatgtagtagtaacatagtaatattagagggagaaataataagctagcaaaatatatttgataaaatgctgaaatatcatacaagaaaatagctagagaaatatactgattatacaagaagataactggaataataggaaagttataggatgtatatggaagatagagcatggaattccaatctttgaattcttaaagaaaggcagagcaagtagaagggaagagcaacaattagaataacaagaactgtgtttgggatgggcaaggtttcattatatactagggtggcccatcagcagaaaaccaactctgacatatttcatagacaactcaaatagagttcttcatctatccaatatatatttattatgtgttgacattgtttcaggcactgtgtttactgtacactgggggtacaatggtgcctgtcctcctggagcttatgttctcatgtggaagacagaccaaaaaaaatgaatgaaacagacatataagtaaaatatttgcaggtgataatgagtgctatgaaggaaactaacaaagggttaagatacagaatgccatggttctagttgagaaggattgatcatggagtagaatcagggttaggaagttgttacaatagctgcagttgagagataatgggaggccagtggagctaaagagccgagatatatttgtaaatagagttaataggattttctgatgatgtgggtctggggatcaggtaagagggacaatctactgctactggattactggtttaagtaactaggtagcctttattgggaaagactgagagggaactggtttgtggggaaaagggctatgtttcaaggcatgttaagttttagatatctttgagatattcaagtggagatgtcatataagaactggaaacaaagttcaggactcagaagacaggtttaaaattaagaggcaaattttagagttattagcatacagataatatttcaaatttaaaagtttttaaaataaatattatctgtataattatagaatcacaggggattgcaaaaataatacataaagtcccatgaactcttcttctagcttctcccaatggtgatatcttatataactttagtacaatatcaacaacaggaaatcaacatttgtataatactgttaactagtaatatactaggatactttccctttcagtatcaataaatatagtatcagcctggcacagtggcttatgcctgtaatcccagcactctgggtggctgaggcaggaggattacttgggcccaggagctcgacaccagcctggatgatatggtgaaacctcatctctactacaaatatggaaaaattagccaggtgtagtggtgcacacctgtagttacagctactggggaggcttaagtgggaaagaaagttgaggctgcagtgagccatgatagtaccacagcacttctgcctgggtgaccagagtcagaccttgtctcaaaaaaaatttttttcttaaataaataaatatagcatcaatacagcattataatatgattaatactatatcaataaaatagatacttagtcctaatgccaatgtcttatttaatagaaaagcactcgaggcattgtcattaaaaccaggaaaaagataaggatgtccactatctctgcaactattcatcttatactagaattatcagctaatgcacttagacaagaagaggcatctggtctggtgcggtggctcacgcctgtaatcccagcactttgagaggccaaagtgggcggatcacttgaggccaggagtttgggaccagcctggccaacatagcaaaaccctgtctgtactaaaaagatgaaaaattagccaggtgtggtggtgcatgcctgtggtcccagctactcaggaggctgaggcatgagaattgcctgaacctaggaggtggaggttgcagtgagcacctgtacactgcactgcagcctgagggacagagcgagattctgtctctccaaaaaaaaaaaaaaaaaaaaaaaaaagaaagaagaggcatttgaacatttgaatggataaagaagaatgaaaattatctctatttacaaatgctctgataacatacctgaaaactccagggaatcaaagttaaaacaaatttaaacaataagataattcaatgatataacaggatgcaaaattaatgttaaaaaatatcattaggctgagtgcagtggtttgcgtctgtaattctagccctttgggagatgaaagtgggtggacagcttgagcccaggaattcaagaccagcctgggctacaaaaaagaaaaaggaaaggaaaaagaaaaagaaaaaaatgctgggtgtggtggcacacacctgtggtcccagctgtttgggaggctgaggtaaaaggattgcttgagcccaggctgggggatgaggttgcagtgagctgtgattgcaccactgtactccagcctgggcaacagagcaaggccctgtctcaaaaaaaaaataataataatagtaattagacaatatacacaaataataaacagagggcataatgatagtgaaaaactcatttactatagtaataaagaagatagttcaaaatacagttaacaagaaatatgcaaagcctatatgaggaaaaaatttaaacactccagaaagaaatgaagacatgaataaatggaaagacattccctgttcttggataggatgactcaacattataatgatgtcagttcttcctaagttaatatgtaaattcaatgtagttccaatgaaaatatatatgttgtggcatataaaagttgatactaaagctcatatgggaaaacagacatgcaagaatagctaggaaaagactgacaaaggaaaactacagaggaggggaactagctttaccagatgttaaaacatactataaagcctctgtaattaaaacagtgaagtactgatgcatgaatagacaagtagaccagtggaacagagtaagaagattagaattagacccacctacatatagcaatttaatatatgacaaagatagtatctggaatcagtgagataaaagctaacttcttaataaatggtgctgagacaactgggtagccatttggaaaaaagggaaaattggacacatatctcacaacaaacagtaataaacaccatatggattaatagtctaaatgtaaaaaataaaatcatgcaacaacaagaaggaaacctgaatgaatcctctgtaatcttggtgtagggaaaggctttttcttaatattactcagaatccaggggcagtagaagataaactgatacattttactacagaaaaataaattttgcataaccaaaacactataaacaaagtcaaaagacaactgacaaacttggagaaaatatttgtaacatacaacaaaaggctaatatccctaatatataaagaacttttaaaccttgagtgacaaagtctgggtgtggttgttcacactggtaatcatagcattttggaaagctgaggtgggagaatcacttgagctcaggagtttgagtccagcctgggcaacatagtgagaccctgtctctacaaaaagtcaaaaaattagccaggtgtggtggtgcatgcctatggtcccagctacgtaggaggctgaggcaggaggattgtttgagcccaggaggtcgaggctgcagtgagctgtattcatgccactgcactctagcctggcaaaagggaaaatgtgaaaaagagatgaacagtcaattttcaaaaaaagatataaaaatggctatcaaatataacttattagagaaattcaaattaaaactacatggagataccatttctcacctatcagattggcaaaattaaaaaaaaaaatcacattctgttggcgcaactgtgaggtaatgtgccctcttatacattggtggtaggaatgcaaattgctacaacccttttgaagggatatttggcaatatctaacaaaattacatatgtacttagctttcaacctagcaatcccacttctaggaatctaccctgaagctacacctccaacaatatgaaaatacatatcagaaggttattcattgcagtattgtttataattgcaaaatatataggagaatgattcactaagttatggtgcattcacatagtggaacactatgtactatgcagctgtacaaaaagaatgaaaaagatctctacaaactgatatggagtgattcccaggacatactgttatgtgaaaacataaaccccccaaaactatatgtagtatgctgtccctcctgtaagaaggaatggaggaataagaaaatacctctgtttatttgtggaaagaaaatgcaggaaggataaaccagaaactaaagagattggtcacctacagggggcacgtaggagaggggtggaagaaagtggggaatgggaacaggatagcaggggtcaggaggaagtgacactaacaaatgaatgtattattgttacaaatgaacctaatattgttacaaatgaataaaataactacatagaagggggtggggaagaaaagaacaaacctaagtagctgtggaaaagagtatattgactggattctataaggctaatgacagaaaggactgtacataaatgctgcaatctagttagaaatatgtttctcaaaggcgaatggcttagcaataaccttatgtacatactagaatgaacaaatgagtacatagattgcagataaggaaagctggatttctcactgttggagaaagaaattataaacaagggaaggttaaaacgaaccagaggtatcgttataaactgaggatttttaatatagataaatggatacagaaatataggcatgtgtatatgggtgggatagtacacatacataaacatctcctagttctgtccattgagcgagcacagcacagatgcagttactcctcagtaataatgagcatacctggtgcccagatcttcatctgtaaacattttcttttcttttcttttctttttttttttttttttttgagatggactcttgttctgtcacccaggctggagtgcagtggcgtgatcttggctcactgcaacctctgcctcctgggttcgagcaattctcctgcttcagcctcccaagtagctgggactacaggtacgtgccaccacgcccagataatttttgtatttttagtagagatggggtttcaccatgttggccaggctggtcttgaactcctgacctcaaatgatctgcccactttggcctcccaaagtgctgagattgcacgtgtgagccaccgtgcccggcctctcgttttttttgagacagggtctggctctgttgcccaggctagagtacagtggtgcgatctcggcttactccaacttccgcctcctgggctcaagccagcctcccacttcagccttccaagtagccggtaccataggtgtgcactaccacgcctggctaatttttgtatttcttgtagagactggatttcaccatgttgctctggctggtctcggactcctgggcttcagcagtccacccatcttggcctcccaaaatgctgggattacaggtgtgagccattgtgcctggccaacatagttctctaatgaaaggaaccagctctgctaaaagtggttgattacaggactgggtcagggcaaattcaggataagcctggaagtctagtggtgccagacaagacatgttgaaataatgcaagagccaacctgaaggaacacctactggctaaagctgaagcaatttgagtaagaaaataatgatagtattggattagaacccatagattaaaatctttacaaatccttattgatataaagatatatttatttcattaactaaccagaggggaagagaaagctcttccttccaatggaattccaattaataaatctgagagaaaagaaaaaaaaatagagaattactggccatgctcagtggttcatgcctataatcccagcactttgggaggctgaggcaggtggatggcttgagcccaggagttcgagaccagcctgggcaacatggcaaaaccccatctctacaaaaaatagaaaaattaaccaggtttggaggtgtgcccctatggtcccagctattcgggaggctgaggtgggaggattgattgatcccaggaggttgaggctgcagtgagccgtgatcatgccactgcacttcagcctgggcaacagagtgagactctgtctcaagaaaaaaaaaaaatacaaaacacaaaaatagagaattaccatcaggcagagatcacaatcataaatactgcacggacacaaatgcactgatagatgctaaaattagtaggtgaaagtctgaggagagagagcattgcatagtctcaaagtatctccccaggataccagcttactagagggaaaataataaatttataagaaaactcttcagacaccaagttaactgagtgattggggtaaatatcaccagtaataagatgtatggtatcataaattctttgatattatccattgagaaggatccaccatattttttgtggaattgccaaaaatgcataacttcattccaatcataaaacactggagaaacccaaagggaaggacgttctactaaataattgatcaggattcttcataagtgtcaaggtaatgaaaaagaaaagactgagaaactcttatagactagaggagaccaaagagaaataacaactaaatgtgaggtgggatcttggatgaaatcctacatagaaaaagcatattaataggagaattggtaaaatttaaataacatctacattttaattaacaatatttaattaacgttagtttcctgtttaagataacttataatatgtgagatgcccacattagttgacatagtgaggaatataagggaactctgtactatttttgcaacttttttgtaagtcttacattagttcaaaacagagtttttaaaagagctgtatacgatcatctcaataggtacaaagaaagcttttgataaaattcaacacctgttcattaggaatagaataaaattttccttaacttcataaagagtgtctttagaaaacccagaacaattatcatcctaattggaaaaatattagaagcattccttttaaaattcaggaatatgactaggatactactattactacttttcttcaacaccatattagagttattaaccagtgcaataaacatggaaaaatagatatgtaaagattggaaaggtagaaataaaactgccattattatagatggtttacataccttttccctctgaaaactacaaacaaattattagaaataatgtgaaaatttagcaaagtagctggatataagattaacatacaaaagtcaatcacatttctagagtagagcgactaacaataacaaaggaagctgccattgacaacaatattattttgtactaatagtaataaatgtagcaaagtatgtgcaagacctaaaaaaggaaaaatttttaaatgaagaaaaactaacaaagaatgaaataaacatatactttattcattaattggaagatttaacattgtgaagatttcagttcttttcaagttgatttgtaaattcagcgcatgttcaataaaaatcctcgtaagatttcaagggcgcagtggctcatgcctgtaatgccagcactttgggaggccaaggtaggaggatctcttgaggcaatgagttaaagaccaataagattttcatgtaatttgataagattgtatgatatttatgtagaagagtaagtggttgaaaacagcagggcattttaagaagaaaagcagggaagaataatttaccctatcagctatcaagacttagtatgaacctatagtaactgagatggtgtggttttgcccagttgaagtcagttaaattttaattttgagatttctgtaaaagatacaagtttagtcttttattatgtatatttgaaggtgttacattttggaaagtgtgtgtgtatgaatgatagctaaatggcttctaagtaaaattcagcatatcttgtagatgttgatagaatagaaggggaaggaatgttttgaaataatgaaaataacatggtatgcaaatgctttgcaagagatttgggaaatgtagatatctctggttttaaggatgatctagattcaagtaatagttcagtaatttcataaaactcttatgacaaaattctggatggagaatattctatgaatcccctagagagtttcaggtttttgtagaatgatgtgaaaaatcttgaactaattagataatctttagaagttacttcacaatctttgtttttacacatacacaggaatttatggtgctttattttttacaggttagtagctaaataaagtatattctaaagtttttttattgatgtagggaaatggctaccagtggacattttgagaatattgcagttgtttttcttctgaaagagtaaaccgggtcatgacgcagcgagtttcagtcgtgacttttctgggggcatcgcggcgtcccctttttttgcctttaaagtaaaacgtcgccccgacgcaccccccgcgtatttcggggggcggaggcggcgggccacggcgcgaagaggggcggtgctgacgccggccggtcacgtgggcgtgttgtgggggggaggggcgccgccgcgcggtcggttccgggcggttgggagcgcacgagctagcgagcgagaggcagccgcgcccgccgccgcccctgctctgtatgccgctctctcccggcgcggccgccgccgatcacagcagcaggagccgccgccgccgcggttgatgtggttgggccggggctgaggaggccgccaagatgccgcagtcaaagtcccggaagatcgcgatcctgggctaccggtctgtggggaaatcctcattgacgattcaatttgttgaaggccaatttgtggactcctacgatccaaccatagaaaacacttttacaaagttgatcacagtaaatggacaagaatatcatctttaacttgtagacacagccgggcaagatgaatattctatctttcctcagacatactccatagatattaatggctatattcttgtgtattctgttacatcaatcaaaagttttgaagtgattaaagttatccatggcaaattgttggatatggtggggaaagtacaaatacctattatgttggttggaaataagaaagacctgcatatggaaagggtgatcagttatgaagaagggaaagctttggcagaatcttggaatgcagcttttttggaatcttctgctaaagaaaatcagactgctgttgatgtttttcgaaggatgattttggaggcagaaaaaatggacggggcagcttcacaaggcaagtcttcatgctcggtgatgtgattctgctgcaaagcccgaggacactgggaatatattctagctgaagaagcaaactgcccgttctccttggagataaactatgcttcttttttcttctgttaacctgaaagatatcatttgggtcagagctcccctcccttcagattatgttaactctgagtctgtccaaatgagttcacttccattttcaaattttaagcaatcatattttcaatttatatattgtatttcttaatattatgaccaagaattttattggcattaatttttcagtgtagtttgttgtttaaaataatgtaatcatcaaaatgatgcatattgttacactactattaactaggcttcaatatatcagtgtttatttcattgtgttaaatgtatacttgcaaataaaatagctgcaaacctcaaaaaaacaaaaaaacaaaacaaaaaaaaagagtaaaccaatttggttactcattttaccaatttggttttgattttgcaagtggttacaactcatgagaggattcttatttctgatcaatatattgtgtttttggaaaggacttctgggaaataattatgatgaagccctcgagcaattgcaacaaaaccaaaaattgaaaagtgggacctaataatacttttttaaaatttattttttagagacaggatctcactgttacccaggctggagtgcagtggtctgatcatagctcactgcagcctcaatctcccaggctcaagagattcttctacctcagcctcctgaatagctgggactacaggtgcatgcccccatgcccagctaatttttgtattttttgtagagaccaggttgtgtcatgttgcccaagctggccttgaattcctgagctcaagcgatcctcttgtcttagcctcccaaagtgctggaattacatgtgtgagccaccactcccagccccagaacaactattattaaaaagtcaaaaaacgacagatgttggtaggctgtgtagaaaaggaaatgcttgtacactgttggtgggaatgtaaattagttcagccgctgttgaaaacagtttggggttttctcaaagaagttaaaactgaactatgatttgacccagcaattccattactaggtatatatccaaaagaaaacaaattgttctaccaaaaagacataagcacttgaatattcattgtagcactattcacagtagcaaagtcatgcaatcaacctaggtggccatcagtggaggattgaataaagaaaatgtggtacatatacaccatggaattctacgcagccataaaaaggaatgaaatcaggatggtgcggtggctcatgcctgtaattcccacactttgacaggctgaggcaggcagattgcttgagtccaggagtttgagaccagcctgggcaaggtggcaaaaccctgtctctacaaaaaatacaaaaaaattagctaggtgtggtggtgcacacctgtggccccagctatttgggaggctgaagtgggaggatcacctgagcccaggaggtggagtttacagtgagctgagattgtgccactgcattccagcctgggcaacagagtgacaccttgtctcaaaaaaataaataaataaataaataaattgcagcaacacagatgcagttggaagcaattatcctaagtgaattgagggaggaacaggaaaccaaataacgtgtattctcacttataagtgggagctaaacactggctactcatggacatagaggtggcaacaatacacactggggactactagagggagagggttgaaaaactacctgttgggtactgtgctcagtacctgggtgacaggatcacttgtaccccaaagttcagtatcacgcagtattcccaggtaacagacctgcacatgtacacccgaatctaaagtaaaagttgaaaagaaaagacttctgtactttcatctttatagtgaggtgttacatgttttacaaacctagttctgataatgtgacaggaatataaatttatcttgaatattattaaatatataagtcaaagatcaacacagtgtttccatgaggtagactttttttggaatctaaataaccatgtgtttccacgtaaatttttatgaatcagggacaaatatataatttgatgtcagagatgtttttgttccccaaaagctctatcttgttcatgaaaaacgaagcccagagaagttatgtacaagttcacagagctcattattgacaaaaccagaatttgaatacaactcttctgattccagatttgctggaaatactgtgaaagaagaattcagtctggtagtattacgtgtggttttaattttttctttgtaactttagtttgaattttatgtgtgtgtgagcatctgcatttacttttaaaaacttttattgtaaaagccttcaaacatatacaaaagtagagaatacaaagcataatgaacttaagtacctattagccagcttattaaaacatggtcagtcttgtttcacctgttacatcccttttcttttactgtctaaaggaaggaaagaagaatcacaaatcagtttatgaagtctgctttctaaaaagtacttaagtgtttattgccaatatcttattttggtcggcaatcaatcacatactcaagcatacttctcttaccttcagagaaattaaaatttaatcagcaaaactcatcagcctgtacatttaaaatatatgcatgttattgtacagaaactataccttaataaaaagtgagaaaaaaaatgagacaggaaagagaaaaacatttaaaagacatagtaactgaagaattaaataaccaatccaacacttgaaaaatattacaatgtagcacatgcttaaaagctctctgagctcagggaaaaaagcagcactgtgaatctatagtggtcatcattctatgtggtattgggtaggacaagaagacagccttgcagctggaaattggtgaggacggaggcctcgtgtggaaagagtaaggcacactcagggagagaaccagtgaggtggctctgagcctgtttcagaaggggcttgaggaagaacggcagaggctaggatagttgggaaagcaggatcaaatcagactccagggattggggaaccaattggctgttacagggtggtggagtcaaaaaagaacagaaattttgtgtttggttaattgatagaaaatgatattattaacaaagtaaagaagtatgggaacagcacaagttttttggggatagtaaataattccatttccattgattaaaaatatcaagtttatttttacatctaaactgattcaagacttagctattgtacatgttttagagaaaacaaaactatattttatatctaatcatactttacaacataaaatacagttctaaaaaatattatttgtcaagaaaaatataatgttgccatcttttgtctgtatgcatgttttttttccttagattccagcgtagttagtgacgttgtacttcaagacttactggcatatgtgtcctcaaaacattcctacctcagagatcttcctccgagacagcctcagagggtgaacagtatagactttgtagaattggagcaccttcaacctgatgtgttagtccacgcagtactaagagttgttgatttcctatactgacaggtaaacattttgactgcctccttaattttagattatgaaaaaattaagatacaagaccatcttagtgtaccatttggttatcactatatatgtatcatcagctattaaagtatggtatcatgtgtgatagagtaatgccaactaagatactcattttccttttccagaggcagtatacagttatagaggacagaagcagaaaaaagttatgttaacagtggaacaggcccaagatcaacattatgcgcttgtattatggggtcctggagcagcctggtaccctcaacttcaaaggaaaaaaggtaaatacaccaaaaagcatttaacctatttatatttcggtaaatgattaatgtttatgagcccaagatggagaaaatcttaagagacgagacagcatttgaaatacaagtgatcatgattgaatattcttctgcaaatttcttctgttaaaattttgtacctcttgtagcaattcatttatctaataagtcttcattaattaatggtggtgaaataaaggcttaaatttattcccagatatactactttacctttttagtgaagatcttacctccttcaaataatgttctttaaacatttaattctggagaagcttctacaattttttttcagccagagtactctgataaataaatgctatgattataaggcagatgtcaagggagttaccttaactctttcaagtcacaattaatgttcaataaattacagtttcatatttttattatagttgttttaaaagcatgcactgttagccatccctagaatgttcagtgttaaaatatgacccatgattacatttttctttaaagcataaattatttctggtatattgaattaaatggaattgatgtttcattaaaatagtatagtgtcttccctttgctattgtgagatcctttagttgtaacaatcaaagacagtttcatttgtggcttatgagttatttttccctgctaaattaatttagagattgattcagtatattattattttttacctgaaagagttaatgtctctccaaacttctgccttccaaatagttatttgtagataggatctatcacattgtctctcttaatcattaatagctatgactaggatttgagataagtctaactttggacttttatgttaagatcaaacagggacagatgtttgtttggttgagcaagctgacaaacatgtatcagtgatagactaactatgatcattgaccaccatagcctggctgagaacatgagtctagtgcatgctacacaagaatgtaggtcacaggtatagtggagctgtaacagagcagattgctccatgtttaatgtgaatattcttttaaaattaatagttttttggttaatagaagagaaattacagttgtctctaggtgactctatggtgtttaggttagtattgaaaacgtatgaatccaggaattaagatgttgttgttctttgtacattcattcatccagccccccttatttgtaaccatcattttaaagttttaacatctacttcaatacctcacatcagtctttttaagataaaaataccaattttgaaggattacttaagtaattctattttcctgattttacttttcttttcaagagaccaaccccatttccaaattcccagcaaagagaatctgattgcccagagtaaatttgattcaaaaaactgtgatcaggaagacagggtcacgcaatacaaatatgagagcttgagcttatttcagtggatgggaaaacagttaagggaatcatttgtgatctgggtgaatacataaagatattcactaccaaaaatgtgtatgttcattagcttagaaagatatatgtaatgtattatttagtttaaaaagtagattataggccaggtgtggtggctcactcctgttaacccagtaccttgggaggctgaggtgggtggattgcttgagcccaggagtccaagttctcatcttaaaaaaaaataaaaaataaaaaaaattggattgtaaaacttcatgtatagaaaatatattatgttatcatataataaatatttttatgtttatataagttaatacacaaaaattttcaagaaaaccctttatatatgatagtatctcattttaataaaaatgtatctataagtacatatgtgcatttgaaaacctggaaatatgcatgtatagcaaaatgctagccgtagttatttctgtatagtagtattatatgtgctttaatttttttctttatacctttagtttgaatttcatatgtgtgtgagcatctgcatttacttttaaaaacttttattataaaagccttcaagcatatacaaaagtagagagaatactaagcataaggcactttttttttttgtttgtttgagacagagtttcattcttgtcacccaggctggaatgtagtggcatgatctctgctcactgcaacctccacctcctgggttcaagttattctcctgcctcagcctcccaagtaactggaattacaggcatgtgccatcatgcccagcttatttttgtatttttagtagagacgaggtttcaccatgttggccaggctggtctcaaactcctgatctcaggtgattcacccgcctcagcctcccaaagtgctgggattataggcatgagccagccaccgcacccggccagcataatgaacttcggtacctattagccagcttattaaaacatggtcagtcttgtttcacctgttacctccctcatctttactgtttaaatatttcacaataaatgtattttattttataattaaaaataaaattaaaaccttatgctttttaaaataaaagaatagttaatgtttggaaaatctagctaacaatgtgagaaaaaatagaattaaatttatactttatatttgtgccaatataaatttcagatacattagagattcaaatacaaaaataatgaaacaatgaatagtagaagaaaatataggcaaaattatttgtaatgcaaaggttggtagggtaaataaaatccaggaacaaaaactattatacataaaaaccaccatgtacaaaattgaaaggcaacaaaaaaaaaacagaaaaaaaattacattgtcagacaataatgcagtaagcaaaagacacatatctatagagttaaatggggaaaggatatgagtaggcaagtccccaaagaagaaataaaaatggccaataaatatatggaaaaattgttcttacaagtaattgaaaacacacaaagtaatgatgatagattatttttcttttaagaaattgattgagaagatatgggaaaacagctactgtcatcagctattggaaatgcaaactggcagaacctttcttgaggataactgacaattaatatgaacaaattgggggtacttttagcccaataattttagctctaggaacttatcataactatgtataaagatgtagctgaaaatgggtttatcatggtatcatgtataattgtgaaaaataaaaaacaaccagagtccctcaaaatagaggtttgctgtaataatttttaagattttggtgtatctggacaatggcatattatgtaatatttaaaagcaatgtagaataatacatacatataaaactatatttgacttattaagtcaatcccaataaataaaatcccaaacaactggttgtccgctaaaatgttaactgcttatttagggtgttgagattatggctgctatatgtttatttacttggcttctcttagcttacttttctaatcaggtattttgtaataagacaagaaagctattttagtgattggttttaagcagtaacttggaatatatgctttagttctagctagtgatgttctgtctttacagatttactgagatgtttgatgattttccaccaaaaaaaaaaaaaaaatctttagtgaaagaaactaaggagatgagcaggtgtagtaaattagatttatggcctgaagtgagaaactaaaaagacagctgatgttatcagaaaaatgagtgctaagaaaccctcttttgttttattatagttttgaagttgaatttactaatacagaatatgataatacagataagttgaatttactaatagagaatataacagtaacaaggtctgtgttactgtggctttaagtattagaattgtggccggcgcggtggctcccgcctgtaatcccagcactttgggaagccgaggcgggcggatcacgaggtcaggagatggagaccatcctggctaacacagtgaaaccccgtctctactaaaaatgcaaaaaaaattagccgggcgtggtggcaggcgcctgtagtcccagctactccggaggctgaggcaggagaatggcttgaacccgggacgtggagcttgcagtgagccgagattgcgccactgtgctccagcctgggcaacagagcgagactccgtctcaaaaaaaaaaaaaaattgttactgagagttaaaaataagtactattgtgtctaaatgctttttgttctagaaaagttaactaagataactaaagtattgaaatatgagtgaaatattagacttgggttcatttcagtgtcctttctttaacaaaacaaaacaaaactttgcctatagatagatacatgagaattttctttacagaaagcagttggttattataaatgatgaccgttcaggagggcaaggaatctttagaaaatattttattaaaattatctctggtggcccggcgcggaggcttatgcctgtaatcccagcactgtgggaggccgaggtgggcggatcatgaggtcaggagttcaagaccagcctgaccaacatggcgaaaccctgtctctactaaaaatacaaaaattagccgggagtggtggcacgcacctgtaatcccagctactcaggaggccgaggcaggagaatcacttgaacctgggaggtggaggtttcagtgagccgagatcacaccactgctctccagcctgggcaacagagcgagactctgtcttggaaaaaaaaaataataataataatctctagcatgcttctgttgtcttaatgcaccattcatattttgtctctgtttacccaaattctttagtgataaaagattagtattcaactgacttaatcagatcaatctatttaatctgatactaagcctagatttttttttcctttttggtgacttttgtttttactgtttttgtttaaggttatatttgggaatttaaatatctttttgttcagcgcaattacacactagaaaacctagaattgcatacaacgccttggtcatcctgtgagtgcttgtttgatgatgatataagggcaattacatttaaagcaaaatttcaaaaaagtgcaccctcctttgtgaagatatcagacttagcaacccacctagaggataagtgttcaggtaagatttttatatacataaattctgctatttttatttcttttgaaacagagtcttgctctgttgctcaggctggaatacagtggtgtgaacacagctcactgcagtctccacctcccaggtttaagtgattctccccgctcagcctttcgggtagctgaggagggaagggaaggctagtgcataccatcagtgcatgccaccacacccagctatttatttatttattattttggcagagacagagtctccctatgttgcccagtctggtctcaaactcctggactcaagtgatcctcttgccttggactcccaaagtgctggaattacaggcatgagccaccacacccagcccactgctagttttaatataagcaaaaaggctaccacttgtggtaaaaatgtataagtctatataaaagtgaaatataaatctttgcaaatatctgaactagattccagtagttttaggaactatgtgctaggaaccagggacaaagagcaaatacctattttttattatatgacaagtgggagcagaaattcagatccttactttatcttggccaaatgccagattaaaatgttactagttgggttaattcacatatatgtgtaaatatgttttccaatatatgattgaaggttagcattgttatatcataaaactatgctaaggagaatacaggcagaaaacaaagacaatacctctcaaaaaacccaacttttaattgaatacagagatttcattctcagagaagaactccttattcttagttctacactgaaacatttactaataccagcagatagtttaaattaataatatttctggaaggtaaacacagatgatagaaaatttataagcttttatactataaaaatttcatactattttcaaaaatggaagttgcctatggtcataaaagactctagatttatactaactggtaaaatcttggtaatgttatagcatcatgtaagttcctaagccagttttatatttatgtgcccctcccgtgctctgcttctccaacttcacagacatatagaggtggtcaccacaggaaggaatgccagacacagttgaggggctaccttactttgcagagacgtttagtttggtgccatggagaagtcaactctgttatttactgcttacacaaaacagttatctgctgggattgaagtctagaattaggtttaaaaataaaaataaataacatcatggacaacaacaaaataggaggccaccacgctgatgatgaaagattctcaggctatagccccacttgtttgaggacgcagccaggaattgtgcatgttcttggaagtcctggaggtgtgctcctcattagcaagccatgccaaaactgtgccattaaaatcagtccttcagaggctttgttcacagaggcctgtttagcctttttcattctctttatgttcagctatgagggctgaattcatagtttctgtcatagtgtatgtgtttttaagacaaaaatggagagagaatatgaaaacacaagcaacttttccctaacctattttatagttaaataaaaggagaaagagagatcagcatgggagcatttcctagaagggtctgcttgctcaacaaaagccagagggggatgaggctaggcctgagtccttgtaaagaaatgaagacgcttacccagtacctcatcttaccgccagcagaatttcagtgctcagccggagtgacccccttgaaagcaaagtccacattcagcgtgaccttttaattcttttcaagagttgtgtaaatttacaaaatgataggattatgtgaacattcttttaaaattattgaattattacgaattttttaggctgggcagggtggctcatgcctataattccagcactttgggaggccgaggtgggtggatcatttgaggtcaggagtttgagaccagcctggccaacgtggtgaaaccctgcctctactaaaaatacaaaacttagccaggcatgatgtcgggtgcctgtagtcccagctacttgggaggctgaggcaggaaaattgcttgaacgcaggaggcagaggttgcagtgagccgagattgcaccactgcagtgcagactgggtgacagagcaatactctgtctcaaaaaaaaaaaaaaaaaaaagactttttgagtggagggaggagagcaagggttgaaaaactaactgttgggtactctgcctactacaggagactacttgggtgatgatatgcccatgtaacaaacctgcacatctaccctctgaatctaaaataaaaatcgaaattttttttttacatatttttttaggccagacacattggctcaagcctgtaatcccagcattctgggaggccaagaagagtggatcacttgagcccaggagttggagaccagcctggtcaacatggcaaatccccatctccacaaaaaaatacaaaaattagccaggtgtggtggtgtgtgcctgtagtcccagctactcaggaagctgaggtgggaggatcacttgtgcccagggaggttgagactgcagtgagtcaagattgcaccactgcactctagcctggacgacagagtgagactgtctcaaaacaacaaaaaataataattttgtagtgatttaacatgtctttggaaagatgtggtattgaatcttctacagtttgttacatattcgatcgctacgcactcctgctaactcatgtagggatatgtgacacaattggaagagatgatgaaaccgtctttgggcattgaaagactaaagcaaatgaagttaagaacagaagactcatcattaactggactctgaaagagataaccagaaaacagtaggagactagagtgattagttcttgacctggagtgttcttacttctaagtggatgaagaagaacaaatttgaaggcttaaggcttaaagaagcctttaaattgactatggagaaagggagaataatgctcaagaaaactcatagacctcaccagtacacagtaagacaaaagtaaattaggaaaaaataatgtctgggagatagtagactttcagtatttgtttactggtgaatggatgagccattagcagtgaattatgaatatgcttgaggtttcttgtgagtcacctgagaaacgattaataaatgagaactttttataacccacagccagagtatatagatgataatggtgagcggaaagttggaaaaaagtttaaaagagaacaggctattgatatttttacgtagagagaagaagaaaagttcacctcctatttggcttttttttttttttttttttgagacggagtctcgctctttcgcccaggccggtgtgcagtggtgtgatcttggctcactataagctctgcctcctgggttcaagccattctcctgcctcagcctcccgagtagctgagactacaggcgccagccaccgcgcccggctaattttttgtatttttagtagagacagggtttcaccatgttagccaggatggtctcgatctcctgacctcgtgatctgcccgcgtcggcctcccaaagtgctgggattacaggtgtgagccactgtgcccggcccctatctggcttttcaccatgatcagtttaaaagaagacagggcaaggagagagggcatgttagctagtttcaagtattcgaagggatttcttctaaaggaggtattgaacttattttgcctgattccagaggatggggaaggaaggaaacatcacatgttcagccaaattagccaagtaaacctgctctcagttgcagccagacctccctgcccttagattctaggaaaatagtaaagaagacgaagaacaagacctcagtgtatccttttactacaagtgactgtaaatcaactataaaattagccatgtttgtaaattaaagttataattttggcccaataatttataacatatctgtttgttgtttgtaggagtggttctaattaaagcccagatttcagagctggcatttcctcttacagcagctcagaagatagctctaaatgctcacagttctctgaagagtattttttcttctcttcccaacatcatatatactggctgtgcaaaatgtggattggaactagaaacagatgagaacaggatctacaaacaatgttttagctgcttgccatttactatgaagaaaatatattataggtaaggcaactaagcaagccaatttgatggaaaataattattatagatctggaaaaactagtctgtaaactcttactttctaaaaagaattaactagagctagtcgaagagaacaaaattttccctgagtgatagatagctatttatggtagcaaaaattacccaggaatcgttataggaatttcttaaagataggaatttcttaaagcagtaattgggagattttattgtcttcaaacagctgtaccaaagaaacattttccttggtttactttttaaccaaaatctaaatgctcataaataactcattttcccaccttaacatataattagaatttaaaggctaaaagtaccatatgatgtcacctctgagttgttgtggaagctagtaagacatttaagctgttttcccacctttaccttagaaattaaagctagcaaataaatgttatatggtaaaactgctaatcagctcagtgaaaaacacattgttttttgaataataggtagtcaaaagctcagacatttttctctttaccttataaattacatgtgtttacaaaatagcactcagtgttttatgctccttatgattatttctaaatattgcggtatctaaaaactaaattcagatatattccacatgttatcatggcatacttcaagaaaagttatagaagcttaatttgtaaaccttatttctctttacagatattatgtttgttataaataagtgaatgaattttgctattactgtgaaagttgcttttgtggaaaagaagattgaattaagatgtatggtaggctgggtgtggtggctcatgcctgtaatcccagcactttgggaggctgtggtggggggatcgctggagcccaggggttcaagaccagcctgggaaacacagggaaaccccatctctaccaaaaaaaaaaaaaaaaagctgggcatggtgacataggcctgtagtcccagctacttgggaggctgaggcgggaggattgtttgagcccaggagatcgattgttacagtgagctatgtttgcaccactgcactctagcttgtgcaacagagtgagaccctgtctcaaaatcaaaacaaaaaatgcatggtatgtaacaaacaacattgatttattaatagttaaggcccctcaaaagtatgtataggtgacttatttatatcattccaaatgtttctattcaacataagcatttattggacaaaaatgttgctcaatactattccttatggggaggagggcctttgaatctttagtttacaaaatgactgttcaagagaaggacttcacagatcagtatcacctgattatggcataactagtatggggtatttaagatctcttcctaaactataccacattaaagatgtagtgctagtttgttgtcttactagaatgttgaatggtcatgttaaggcaagaattattattttttatttatttaaaagcctttttttttatttttttgagacagagtttcgctcttgttgcccaggctggagtgcactggtgcgatctcagctcatcgcaacctctgcctcccaggttcaagtgattcttctgtctcagcctcccaagtagctgggattacaggcatgtgccaccacgcctggctaattttgtatttttatagagacagggtttctccatgttggtcaggctggtctcgaactcctgacctcaggtgatccacccgtctcagcctcccaaagtgctggaattacaggtgtgagccaccaagcccagcctaaaagcctttaaattattagagtccagattatgtggtttccttggaaagaaaatattgaaattaacaaactcccttcaagttatcaagtatgtgactccaaaatcatctacataaatcaatcagcaaactgaataagagaaaactctcattgattatttttctaagactcagtcaaatatttattaggaatccacgtatgttcacatatcacatgtgtactgtggatgttatactagttgatctaagtagacttattgtgcccaagaagcttggtagtccatttaagaaacacttaatgaacatttgtgtggcacaacagtcccaaactatgagtgggttgatcatattttacattggttgtaacttggagctgattttccaatggaagcaacattagatattgcaatggagtctcatacgaggccacagacatttattaaattaacatgtagatagcatagttcctgctcttcaagctatcataaaactcaaataccatttttaacaatgtttctacagaatattcagatttacatttttggaatacaagaaatacatttatttttctgtactggaagcaaaaaaccccagcaggtcaaaccacaattaaggctcctatttaggcagcactaggaaatgtttgggtctctcaagaggttgtagtcaaggtgtaggctggggctgcagtcatctgaaggcttgactggggctggaggattcatttccaaagtggctcattcatatggctggcaagttgagttcctcttcacttgggtgtctccacgggctgcctgaatgttctcacaaagtggcagctcatttcctcagagcaggaaaggcaagaaagagagttccaggtggaagccagcctttttgtgacctagactcagaagtcatgtggcatcacttctaccaaattctgttcatcagaagtgagtttagctgtgcgttggagagtggattagaatgaagctagtgcagagaagcggtaagaggctgttgccttattttggagaggagatgatggtggcttgactagagaggaagcggtaggaataaaaagaagtggacagatttgagaatggtcagaaaatagtttgcaagatgtagtgattggtaggtaaagagagagcacaggtacattgcaaatcattgacagttgggtgaacaataagattatttattaaaacaagtaaccttgggagaaatcttgatcatattgagcttgagttcctgagaggtaacaagttggaaagtggttagatgtaaagaaatgcaatttgcaagagaagtctgggctaggcttataaggttatctgtggtgattgaacttttccttggtttctgcaccctgttttgtttttccttcttaatcttcagtgattacctctcataatggattattcttactagcctataaagacagtcccatatttctcttattaaaaaacaaacaaaatcatccattaacattacatctccctcttatcccttcgtttttctattctgttttatacccagccaaactttgttaaagagttgtaaatatactctctctcccctattatgtcttcagtttcacttcagttattccattctactcctaccatgctgcagaagctgcttttgtcaaagttacacttttgatgttgcctgaggcatggatacttctttcctcgctctaactgctctcagttatattcagcatgtcagtccacttcctccttcttgaaacagcctcctccttgctttctaacctgtctctcaggcccttctttctcagccttttctaccccctctttaaatgctctcgtctgtgtccttcctcttattctttctgtacattctgcctggatgatcacagctgttttcgtatttgtacttaacatcttcaccctgattttctcctccaggctccagtagtcaggtatcaaattctttgcttgatgtccatctcacatttaaacatacccacaatagactcttgtttttcctaaaaccacactcaaatctagttctcttcgtttttatactttctggaaaatggcacaccatctacccaattatttaggctggaaacctgggcacaatcgttgcatcattttctcttccctacctcccctatctaatctattagcaagtcctaggaattttcattcagaactatatcacaaattcatccacttttttccatctccactgctaacatcttagtccagtgtatcccagcaggggcattgttgacatttttctcaggacagtttctcattatgtaccatatcccacatgctgcggggcatgtggcatccctgtttaccttcccctagctgaacctcaattactgtgaaaccaaaatggaaagtcagtgcctgctggtctggaatcactcaggcctcatctgagtccctactacctgttgcgcaaaccagcacaccagcagtctcttggtggggctcctcctggccttgcctcctcccctttattctccacccgttggcagtgtgattaccctttgcttcacccatcagtcatctccttatgcttgtttcctctgcagtctcatctgctgccactcccctgttgtccagcactctagccacgtggccttctttcagttcttcagacattttgatttttctccttaggatgttctcgaatgtcttccctctgactccacaaggctggtttcttcatgtcttagattaaatgctgctttatcagagaggcctctcctaaccacccttctttattttctgttatagtagcctgggtgtgcttactgtaatttgtatttgcatactgtcttttctaaaaaacatttttactgaagttaaaattcatataccatcaaattaatcttctgaaatgtacaattcaatggcggtagtatattccaagggctgtgtagctatcaccacaaccagttaggacattttcattacccagccctttacaaagcctcatactcattagcagtcactctccattccccatgcccctcaacccatggcaactacgaatctgctttctgtctctatagatttgcctgttctagatattttatataaatattatataatatgtgatcttttgtgactggcttcacttagcatgatgttttcaaggtccatccatgttgtagcatgtatcactacttcattcctttttattgcaaaataatattttattgtatgcacataccacattttatttatccattcatcagttgatggacaattgggttgtttctactctttggctattatgaatgatgctgctgtgaacatttgtgtacaagtttttgtgtggatatgtgtgttcatttctcttgggtatatatctaggagtggtggaattgctgggtcatatggtaactgtctgtttaaccttttgaggaactaccaggctgttttccaaaattgctgcacaattttacattctcatcagcaatatgagggttgtaatttccccatattcttgccagtacttcttattccgtttttctttttgttgcatgtgctttcgggtcatatctaagaaaggtgtcatttctaagccaaggttatggagatttgctcccgtattttcttctaagagtttagtagttttacctcctacatttaggtttattatctactttgagttaagttttgtatatgggataaggaaggggtataattttattttttggcatgtggatatctagttgtcccagcgtgaatttttgaaaagactgttccatccctgtttagtcatcttggcaccactgttgaaaagcttattttctttcttcttctttttgtagagatgaggtctcgttgtgttgcccaggctggtctcaaactcctggcctcaagcagtcctcctcaccttggcatcccaaagcgctgggattacaggcatgagccaccgcgcatgcccaatttcttcctatccctctacagttttacgttccttgagtgacggaaccagatttgtctttttcactagtgggtacccagcacttaccacagtccatgatagatactcagtttgtatttgttgaaataaataatggagggagagagaggctgaggaaagagtgtagagtgaaaagaggaaggaacatagagtcatcgtgtgaataaagggggaagtgggtttttagggggaaaatcagtagttatgttttagctctgttacattaaattcccccgctaatgagcctgtttctgaattctgttctcaatttattttttaaaaatcaatgtagttataaaataggtaccacatgccatggttaaaatgcacactacataggaggttataaaacaaagagtgaaagtctccttcaccatccaaccctctcccaccagtgctgcttccatgctggtgagaaggttttttgtatgtccttccagtgatttattatgttcatcccagcacatgtgtatccctttctttagaagcatgtggacagaagaatattgttcatattgttgttccctagagtctatcctggtgctccttccctaatagcacttgcaaatgttcttcattctttttatcagctacatagcattaagatgtaggatgcactgaaaattgttaatccagttttattgatatgcaaaacagtttatttctgataggaaagaattcagttgaaaaaagtaacttgaaattgtgattgtgaaatatgtgattattatttttattttcatttctaaaaacaatttataaaacagtttaatatatttttatattagtatctgaaatttaaaaatggatatagaataaataaaatgtagtaatttatcatttgaagctcttggggaaaaaaaaacctttttttccttctaggatgtcacagaacatcctagagttgttttaagcattaaaattaatcctgcattaaaaaccaagtgctttttggaattatttttcatttaaacatttcttttatttgaaaatctttttgaaggtcgtgtgttgtttactcttctgtaggccagcgttaatgactgccgttgatggaagacataatgtttacatccgtgtagaatcaaaactgatagagaagattcttctcaacatttctgcacactgcctcaacagagtgataggcaatatatcagtgtgccatcaagaagttgttttattcaggagtataaatggtatatcggaacagaaagagcactctactttaaattaagagcttttctgtccatatgaaaacagaaggataatttagcttaagtgaaatataagcctatgtaagttagaaggttgacttgctttacacctgttagtacatgaacagtgggaggcacctaatttcttcttaacctacatttcctgttggtaagcaaaaactattttacttaactctagttttataagaatgaagtcaatgagtgtatgacataatatatatgaagatagtccagtgtcagtggaatggatttgcaagatcttcaaccatgatgtcttagttgtcagtggctaagaataaagcaaagataatatatttgtcaggtattcaaactccattcctgttctcattagcctcagatcctctaagctgatgagctaatctggttctgtgattgctttatctttcaatagtagattgtttttcgtgtttttttttagttgggggtgtctagtaattttgggttgaatgctgaacgttgcatatattaagtagaacagtacaaactgaggtaaatagtagttgtacctggaaacaggcatgcctcttctggtcctttactggaggtgaggggtgagcaggatggtcagccttgtcataagttgagttggattcaggttttgttgtttctctggttaccttcaggtcaccactggtttcaaattatcttgtgcttatggtgggaagtggttccccagtattcctgctccaccatcagcatagccctccactctgcacctgggcctcagagaaagtttctttccatattcttgcacctccccaagttgcacaagcttttgttggttgttatttggtgcatcctaacctggtgggtgggagcagggttgttcctctttgattctggtccagccccagtcttatacggatgttgcacatggcgctttcttggtagccctgtcccttatgtggcatggcagctgagctctgtcttgtgcctttagtgggtcttgtgtggtcctggccctgccccagcagtaggggaccactaatggtcttgacccagggtggtttttcagtcctcccccaggatggaggtttttttttttcttttttctttcccccatctgtactggttcctcacctgtaccctggggcaacaggatttggtgtccctcctccagcaattgaaggcttttgttccttaaaggggaggccagatggtgctttgtgttttgtagttggaagctttctctgatgtcttgccctgcccccagtcttatgagcacctggtggaggtgagacgtactatgtggaagagcctatgaggatgcagatgttccttatgttgctgacactggcagttcattggctttttgcaattaatttattaataaaaattaatcacattcttctttcctgcctgtatggaggacctgtcttcttcccaaggcctgccccaagggaacctgtgctcctgttccatctccctggaggcacctgtctccttatgtttcagtctttttggctgttttacaaccttggttctcatgtgtattcaagaaaatgatgattttatatttattcagttttttccagtaactgttagggtaggagccactttttccagctttctacatcttaattagaagcctctctccgttttttcccccattttctttatttcatttttattcttttggctattttcattccttttcttaatgttacttatatattttcagtgttatctcttctttttttttttgagatggagttttgctcttgttgcctagactggagtgctgtggcgcgatctcagttcaccataacctctgcctcctggattcaagcaagtctcctgcctcagtttcccaagtagctgggattacaggcttgtgccaccatgcccggctaattttgtatttttagtagatatggggtttctctatgttagtcaggctggtcttgaactcccaacctcaggtgatctgcctgcctcggtctcccaaagtgctgggattacaggcgtgagctgccgtgtccggcctatctcttcttttttgcataatgtaaattagtctttatctcttagagaagcataattctcatatcacatatacttcagtgttttgtccattcttgagacaattaaagttgtacttcttggcattaattagattgtgatcataagtcaaaatgtcattggtcataaagtggtcatcagaccatgcagactattactaatattggttatgttttagtttattgcagtgaaaatacaaaatttaaaagttattgtagagaattatcataccccccaaaatatgtcattggtcctccaggactctgtagtccccatccaagaaagactgtgataattgtcaaggggttagtacggtctgagcatggtcgatggtgctctgtcattctggtattgaacaacctcccaaatgtcttgattacatgtcctaaaaaagtgaggggaagagtgtaggacaaatgcaaaataaaataacacatttagctatacttttagtattttttattattgagattcaatatttaagtgaccgattcaagattcttttatataaaaaatgaatatatgcataagtaactgtgataagaactgtggatggataagagcactcgtctgatgtactgcagcataaccagaactgctgtcggtctgaacggtgtgttatctgggcctgtttcttgtgtcagggggatcacatgccgtcactctggagtgcctcaatagcttgtaactagaaagagaaggtatagaaagagtagtttacttacctgtttatttatttagaggcagagtcttgctctgttgcccaggctggagtgcagtggcacaatctcagctcattgcaacctctacctcctgggttcaagcaaatctcctgcctcagcttcccgagtagctgggattacaggcatgtgccaccactcccggctaatttttgtatttttagtagagacagggttttactgtgttggccaggcatgtctcgaactcctgacctcaagtaatccagccacctccgtctcccagagtgctgggattacaggtgtgagccaccgctactggccgggaggagaaatttaaaatgggtttgagacttgaggaaccaaaagaaacaatgaaaccattcaatgtgtgtgctcctgtcaagctagcagcgatcttgagagctctgtgttttcgtcttctgcagttccttcctcagagatcacctatgggatggttgtggcagacctgttccactccttgttggcagtcagcgcagaaccttgtgtattgaagattcagagcctttttgtgttagatgaaaacagctatccattacaacaagatttctccctcctggatttttatcctgacatggtaaagcatggagccaatgcccgtctctgaggccagaggaagaaattgcaggcatttcaaggaagaagtactgaaatgatttgtcttttgaaataaatgaatgacagggcttttgctttggattttttatgaaatatattttacaaagagaattgcactagataaattaaaacttttttctaagaaaatcctgtgaggtttaaaaagattgtttttgtcttttggtttcttcctttcttctggagaaatgatctaccagtcaaggcaatatgtagcagatccctgggaattaaaggtttgcccatttgttcactgtatttagtccctgctacattccaggcatcgtactaagtatggggaaccacagagaagacactccttcagaaactgctgcagtgctttcgcttatccctacctaaaaaaccgtcaatgtgaaatcatttccttgattataactataatgataatggattagtttatataaacctatgtttagacaagttcaagacaagcgtgtctttctataaaaagtattgaaagtgaaggaaatgagatcatgtttcaatttattaaagcagggaagagcgttctgtggttagttcgtgtctaggatttgagtgccttactgaatgtatttaccagcaaacatgtagcaatctgttctctcattgtgattgtggaagaagctcatgtaaaatgatagtcattaatgaggaagtatggcgtggtacttattctgtaagctcagagtatgctgagtgttaatagattgtcatattgcctgaaaataaattcatgatgacatgaacaagcttcttttaccctgtgtatgtttttaaaaattcctttggttcagaggtggttgttgttttttaacttggcttccctaagaacgaaccacaagagttttgtgattctttcaaaaataatatgccaaaatgcctttgtgggagcacacacacacaaatgcatgtttctgtggagaaggatccatagctttcaacaaatcctcagagggttctgtgaccaagaaaggtaagaacaaggctttaactgatgagtttctttgtggggtagataagggaattagagcaaatgattgccaaagttttgtctagcaactaataaggtgggtacagaaagaattgactccattttgtatctagagagactggaattcaaacaaaatcattggctcccttcaatgattcgttgaatgggtgatgaaacttgagcctgtagttgacgccttctaatctgtgctctctcaactataaccacactaggcagagatttggaattctgatataaaatctgcccagtcaatataggccaaccaagagagctgttcgcttaagtgtgcccttccccacttcgtcctcaagtggagacctaatccctacatcaaccagaacataatccccaggaagagatggctcttcacatcctattgggaagaaatctttaaaccatttcaggtgagtcaacagatcacaccaacatctcttcacagttgttggtatgtatttcattaattaacacatatttccaggagcccttatttaggttgggaactgtttcctccagtcctgaggaatctgagctatctacagaagttatgagctatttaagtgggatcaggatcagcccattgctcctgctatggtctgaatgtgtcctcccaaaattcttacgttgaaacctcatctctgatggcattcagaagtggggcatctgggaggtgattagatcatgagggctctgcccttgtgaatgggatcagtgcccttacgaaagtggcccgagggagcttctttgtccccttctgccacaggatacagccagaaggtgtcatctttgaagcagagagcaagccctcactagattctcaattttctggcaccttgatcatcccagccttcaaactgtaaaaaataagtttctgttacttataaattgcccagtctgttattttgttatagcacccagaacggactaagacaccttctgtgtgtattctttacctgagttgacaagtaagtgtctttattctgttatgttttcataaaactcagtggggtagccagagtgtcatccagcagtcccatatctggcagtcttatggtgggcatttcagggagacctcattcttcatcttctgttagttcagcttgcagggacagctctcctatttttagagaatcatttttatttgttagtcacttagtttccccagaggtatcctttttctaacagcgttagaggcattcacctttctccccactagtaagatctgtgctgtttcattttacatctttttttttttttttggttgggggaaagggggctgatcatcaaatgagttgacaacattgggtgcatgatccaccctgcagacgttcgctgaatgtctaccatgtgctaggcactggaaatgcaaagacacaaatgtctgccttctgtaagttcacaggcaagctggtgaagaaatatttaaacaaaattatatcagcgccaggattaaatctgtgtggaatacagagccaaggcaaaagaggtaacagtaggatgggtttgttagtcatgactcttggttgcaagtgataaaaacccaactcagagtagcttgagcaaaaaagggggacttgattgactcacataaatgagggtagtaccagcttaaggcacagttgaatccattggcctaaattacctggttaccccaactccctaatttttctttctttctttctttctttctttctttctttcttttctttttctttctttttctctctctctctttctttctttctttctttctttctttcttttttctttctctctccctctccctctctctctctctcatcagaagaggtcttttacgctgttattgcaaaagcatagatgtttctacagagttttgataggataacattttcacagtgattatgaatttacatcgtccctagaattctaaactactgggatctgaggccgtaagttgtttaagagtattctgacattaccttagattcagcaaaacttgaatagttgatcatgcctttcttagaagaaaatatctgtaatttctcagaacaatatagaatgagacagaaaaactaaccatccctatgtgccttattttaagtgatatatttgtatcctgatgggtttctaggtgttggaacacaggtcatgaatcatagaacaattagaataaagtgttcgtctttatcagtagcttaattctggcccttgatttaatgtcaacaggggagaaatgtgtgagaggggatgaggtttgccaattaattgtcattatgtctttggaggtcttgaacctgatttgttattaagaagtgaattctacccacttaaggcatacatttgctaaaggtgacctctctgcttccacgttgttaagaaatcgtgatttttttcaaaacaatcatcagctttacagtttttgaggaaagatctagaagcctgttaaaatggacttaccaggcagggttcagcccaggaaacacaagccactctgggtattctaaacagagagagattaatgtggaattcaggtgtttgcaaaggtattggaaggctggaggagcaggcatcagtctgagctccaggaggctgccacgtgaacggtggattcatgaaaacatcatcattggctgcaatcttagactgaggatgcagctgctggcatcccggcaactgactctcaagcacatggaagctgggagttatttgctgctgcccaaaactcagtccccacagctacacttgccaggaacagtagcttcaggaagatagcctggatttcactcatcttccatattgcacatgtgtgtgtgtttcattgatggaacatgattcacgctgagagctttagctgcaagaaagtttgggaaatatgtcttctctgaggcttttggtctttgcagttcaggagcagttaggaggtgggactggttggttgcagagtgagctgatttactgcacttagtctagcttattaaaggatgagcttataaacaccccaggtaatatcacaatacataagtgctacctaattactgtgtgggtctgttaccaagaatgtctaagtcaagaaattgaagattgtttccttcagattctgcatcctaatgtagaatctttcctattagagtataagtaaattattttggtgtgttatttaagaatatttgtgaataggcttaattaaacaccatgttaagaaattataaacttaaggccaggcacagtggctcacgcctataatcccagcactctgggaggctgaggcgggcagatcacttgaggtcaggagtttgagaccagcctggccaacatggtgaaacctcatctctactaaaaatacaaaagttagccaggcgtggtggtgcacacctgtaatcccagctacttgggaggctgaggcaggagaattgcttgaacctgggaggtggagcttgcagtgagctgagatcacgccagttcactctagcctgggtgacagagtgagactctgtttaaaaaaaaaaaaaattataaacttaaaaaaaaaatgttttcctttaaacaaaaacgcatgttccttgttttttgttttgttttgttttgccttttttgagagacagtcttgctctgtcacccaggctggagtacagtggcacaattatggctcactgtagcctctacctcctgggcgcaagcaatccttccacctcagcctccctggtagctgggactataagtgcagaccacaacaactgattttttattttttgtagagacagggtctccctacattgcccaggctggtcttgagctcctgggctcaaccgaccctcttgccttggcctcccaaagtgctaggactataggcgtgagccactgcaccaggccgtttctttttttttaaaactttggaaaatatggatgaatgaaagtgagaaaagtaacccttctgttattctaccaaccaaagctaattgctgccaacattttaatagatattccttcggttgttttatgcatgtatgattttgtacatgtgtctactttaaaatatatagtctttcaatgttgcccaggctggactcaaactcctgggctcaagtgatccatcacctcagcctcctgcatgtatctacatcttattttattttatttttagagacattctgttaaccaggttggagtgtagtggtgtgatcatggctcactgcagcctcagcctccctgggctcaagtgatcctcctgcctcagcctcctatgagtagctgggactacaggcatatgcctccatacctggatactttttgtattttttgtagagacatgtttttgccatgttgcccaggctggtctaaactcctggcctcaagtgatcccctttgcctcagcctcccaaagtgctgggattacaggtgtagactaccacgtctggccaacattctcattgatagtctttgcacacatctttcattccttctgggaatttattctaagaaaatagaattttggggtcaaagtacttgtatgtatgtatctgtaccaggaaaaaagcagaaattccagtatcaacagataacgagagccacgcagggtggtacatgcctgtagtcccagctactcaggaggctgaggcaggaggattgtgtggcatgagcccaggagttagaggctacagtgagctatgattgcaccactgtactccagcctgggcaatagagcaagaccctgtctctgaaaaaacaaaacaaaacagataaccattgttactattttgttgaacattttccagataccctgatagaagacagatctgtgcatgcacatacacaattttacataaatgggaccattccatataggccagtatctagtgtgtactttttttactccacaatttgccatatacgtctttccaaatcaatcaacatagattaaatcatatcaactacacaggattccatcatttgtgtgtgctcttgaatcctacttttaaaatgttctcagaaaggttatcctgaaatatattcctatcagaagttttccacactctctctaaactgaatggcataagtgaaagactagttgttaggtttaaaaaaggttatctgttttaattggaattttttttttgaggttttctttttcttttttctttttctttttttttgagacacagtttcactctgtcaccctggctggagtgcagtggtgcgatcttggctcactgcaacatctgcctcctgggttcaagcgattctcctgcctcagcctcctgagtagctgggattacaggtgtgcaccaccatgcccagctagtttttgtatttttagtagagacaggattttgccatgttggccaggctagtcttgaacttctggcctcaagtgatctgcctgcctcagcctcccaaagtactgagactacaggtgtgaaccactgttcccagccttaattgaattattttattgctaaagtgattgtacatttgcttcatatgcttatcagtcatttgcagtttgctttttcatattttaccttagaccatttttatgtgggagaagccttttattaaattagtatgttctccttataaagttagtaatttttaacatgtgttgcagacatttttcccaagcttgttatatatgtttgacatgcagaaatcataaatatttacgtggatcaacccatcaatctttttctttattgtttctagattttatggcatgcctagatagcttcttttctactataagattatacacattttcttcaaaaaattttttgaaacatttatgattgttatatttgtatttaaatctttaattatctaaaatttagtgcatggtatgaatggatctaactgattcattttcctaaaatggtcagctggttgtcccaacactattgatttctttctttcccatcagtgacatagatgtgatctttattataatatgaaattattattcctgctagcattacctgtggactttctggtctgtttcattgttctatatttattgctgagccagaaccatacagttagaattattataactttacatctgataggaaaagtacccctatatttttcttcattaaaattgtttttctcagacatctttgcccatctgttcttttttattccccattaagagtatatgttgcagtgttttttagtatattcagagtgtgtgaccatcagcacactcaattttggaacatttcatcacccccaaaagaatcatccatagttacattaactataccaccccacagctcttccttaagaggagctaacagtcgctcctccatacccaccccctttcccccaaccctaggtaaccactcttctacttagtggctgtatagatttcactattctgacatttcacatgaatggaatcatacaatatgtggtcctttgtaactgatttctttcacttggtatagtgttttcaaggttcacacatgtagcatgtatcactacttcattgtttttattgccaaataatattccattgtatggatataccgcattttatgtatctattcatcagttgatggccaactgagtttttcccactttttggttatttttaattatactatcatgaacatttgtgtgcaagtctttgtgtggatgtatattttcatttctcttgggtatgtacccaggagtggaattgctgggttgtatggtttaaccatttgaggaactgccaaacttttctaatgcaggtgcactattttacattcccatgagaatgcattggagttctgatttctccacatcctcaccagcactttttattattatctgactttttgattatagccatcctagtgggcatgccatctgttcttgagataagtttagaatcatttttatcccattgatatttttaatgagattgctttgaatttatggatcatttggacatgttttcagtggttaaggcttactatttaagaagagcatgctttttcaattaataaagtattctttaatgttccttagctttagctttatttagcagtccacatttaaagggtattaactatggaaatttttttttttttgatacagggtctcactctgttgcccaggctggagtgcagtggtatgatctcagctcactgcaacctctgcctctcaggctcaagctatcctcccacctcagcctccttggtaactggggctacaggcatgtgccaccacacctggttaatttttgtattttttgtagagatggagttttgccatgttgcccaggctggtctggaactcctgggctcaagcaatccacctgcctcagcctcctaaagagcttggattacaggtatgagccatcagccagtttttttgtttttttaaatcattgatttcaactatgctctgttgaatcccttttccatcccctcatgtctcacatgcctcacataacttcccaggcattgtgttttagaaagtctggtattgtttaaattctaacctcattttgctcttctccagagcatgtccagctagtcactaaagggacttggaatggggaggagataggtgcacccttcctttcctttgactccagctgttggagctggagggagggcgtgaactggcaccgaggtgaattctccccattccttcccagcttcctgaggcctagctcctccatgagctggggagggagaaaagaaggaaaggggacagtggtacttaccaggcagctaccactgtggtcctctcctttgatggactccgcttttctagccagtacttaactgctgatgccttctgtgcagcaggcgttgagtactcctctttctggggtccatgtgagagttctttcagagctcactcttctatgtactctatgtactcactctatcttatgtacacagttgttttcatgggagatgcagctctgtctggtctttcctgccccctccactctctccaactgtacctcctttctccatcttgcaatctctctctgattcacttcactcgtgctcagacaggcatggagagcaggtcagcaaattcttcacactatcagactttagacaagctaaggaatttccttctctgcatactgtatatagcacagtttgatttatgtaacatcctaatcatactgtctggaagaatcttaccaaaatgatattattcccctacatggggaattagggcttgattttaccttctttattataattatttttacttgatcaaattactaggaaatattcctccacttctaaagaatacaatttccctgtgttagaaagatcagttctggtgtggtggctcactcccgtaatccctgtaccttgggagcctgagatgggaggattgcttgaggccaggaattggagaccagcctggacaacatagcaagatcttgtctctataaaacactaaaaaaaaaaaaaaaaaaaaaattagccaggcatggtgacacactactcaggaggctgaggcaggaagatcacttgagcccgggagtttgaggctgcagtgagctatgatctgccactacactccagcctggatgacaaagcgagaccctgtctctaaaaaaataaaaccaacaacaaacatacataaataaaaagatcacatccaaataatagaaaaagatgatatggttttggtccccaaaactgacatcatgtaggagatattggaactttgtgggtgggagccaagcccattctggtgccccttctctaggtcacgtctatactgcttgtttggattccttggcaaaaactgattatgcaaggcagtaggatgcctggctcaaattgggtcaatcagatcctttttcttggaatttaaaaaaaaattgcatgaaaacgtatagttaaatgcacaggtcttaagtgtacaatttagagttttgacaaatatatacattcatgtaactgaaccccaaacaagatatggagcatttccatcaccctagaattttcattcatccccacttccagtcagtctcctccatccatgatggccaaccactattctgatttctatcactatacactagtttgatctttgtttggacttcatgtaaatgaaatcatacagtatatattcctttgtaactggctttttttaacctaagaatgtttttcaggcttatccatatttttatgtgaatcagcagtttattcttttttattgttcagtaatatatcaatgtgtgaatatattatccattcgcctgttgaaggtcatttgagttctttccagtttcgaactattatgaataaagctgctaaaaacatttttaaaacaagtcttgttgtggacataagtttttgttggggcagggatttaaatagctaggactgagattgtcagtttattggataggtatatatttaacttgagaagaatctgccaaacagtgctccaaagttgtgcaattttacactctccgcagccaaaatggaggcttccagttgttgtacatccttgtcaacatttgagatgtcagtcattttcactgtagccattctagaggctgtaaagtggaacctcctggttttggtttctctttcactgatgactaatgatgcacaacttttcatgtgctcattggccatttgtataccttcatttgtgaagtgtctctcaagtcatctgcacatttatcttattgggttgtttgtctttttactgatcagacatatgtattctagataaaagtcagatatatgtattattgatatttcaaagcattttgttcagcagtagaaatgctggctatatgatttgagaataaaaatacgtatgtaatcgtaacaagaagtcttaaataaattaaaatgtcactattttgaataactagaatatatattaagaaaaataatcccaggaaataaaaaatatgctagtaatatattaattacacataacaaatttacaaaattatattaccatataacagtaatacataattctaaataaaaataatcatgctcacagataaaaccaaaaactttaagagcttaatttattgaaaggaaatgatttaaatatcatgagggaaataaaaggagacaagaagtagtggaacactctactgtgctcctgctgtttgggaagatgtactatacagagttaattcaacaataaacaaagtccctgagggatggcctatacaagttgacaagttgatgtaaaaattaattgagggaattaaacagaaatgtaaatattccaataaccatcgaattatacattttaaatggatgaatcgtatatgtgaattatatctcaataaaacgattataaaaaaagaataaacagggattttttttttttttgagacagagttttgctcttgttgcccaggctggagtgcaatggcacgatcttggctcaccgcaacctccacctctcaggttcaagcaattcttctgcctcagcctcccgagtagctgggattacaggcatgcacctccatgcctggctaattttgtatttttaatagagatggggtttttccatgttggccagactggtctcagactcccaggcttaggtgagcctctcgcctcgctctcccaaagtgctgggattacaggcgtgagccactgcgcctggcctaacagggaaatatttttcaagttaaagcaaaaaaacaaggtaagccaagtaaaactatataaaaatatatgattttggtgtttacagcgcattgggtaaaaaatcttactcagaaacagtatgtaaaatatttcatttttagaaaactatacattaaatcaatggagagtggccaaaaaattttaacactgtttatctcaaggagctacaactatggtaaatattttccttaataatgaaatgtggaaacatttctgagaacagaaataagacgaagatgtccattatcatcacttgtattcaatactttcctggtattcctaacaagagtaataaggcaaaaaagttgaaataaaaatactaagattggacctaagatacaaaactatgtatgtatattaacaactcaaaagaatccagagacaagttattagaattagtgagtttagcatgactgaataaatggtcaaaataggaaaaccaattttatttctgtataccagcaagagttagaaaataaaacattttaaaacaataccatttatggtagcataaaaattcaaatgtctggggaaaaatttaatgaaagatgtccatgacactttaaatattatttagagaaatgagagaagaggtaaataaacagaagtacataccatgtgaactgattagatgacccagtattttaaagatgtcaattctcccctgaattgacttataaactcaatgcaaccccgggcgcagtggctcacgcctgtaatcccagcactttgggaggctgaggcgggcagatcacgaggtcaggagatcgagaccatcctggttaacacggtgaaaccctgtctctactaaaaaaaaaaaaaaaaaaaaaaatacaaaaaattagccgggcgtggtggcgggcgcctgtagtcccagctactcgggaggctgaggcaggagaatggcatgaacccgggaggcggagcttgcagtgagccaagatcaggccactgcactccagcctgggcgacagagcaagactctgtctcaaaaaaaaaaaaaaaagaaatggaaaaagaaaaaaatctcaatgcaatcccaatcaaaatcacaacaggcttcatatatatatatatatatatatatatgtgtgtgtgtgtgtgtgtgtgtgtgtgtgtgtgtgtgtgtgtgtgagagagagagagagagagagagaagttgcatggttaggtggtaaaagcagtgtttgccataaaaatcaggtcgttggttattttggtggggagggagaggtagtgtttggaaggggacacaagggaaggttttgggacgcatggtataccggttgtcaatgtatggcctcgcacctccaaatccatcctttaatacctgctctgtgggcacagccagaatccccttccgcggctcccctcgcggcagggaggatgctgaacagtagagggcgctggagacacgctgcgggaggctgtcgctcgggtccggctgcgggccacaggccgcggatcgcgctctgccagcgccccacgcccgcaagcgcggcccctccgccacctcgcggcccggcctgacctgttaatcacgtccccacggctctcctagcggggacaccgccgtctgcaggctccgtccccacagtgcccagaccccgggaagtttgtcagtcagcaccctgatgccagccgattctcaaaaagccaggaggatccaagcagatgatttgccagacggtactgcagcaatggagatgaacagataattcacacagaaagaaggacggtagggagagacgtgcggggggtagggagggcggaaggaaggtctaggggaaggagcggagggggaagggaggaaggaaggcagcaatggaatgaaaggagaagggaggaaggactcgttgaatgcacagcctccccggtgctgcaccgacaggagcggctctcacaggcatggggcccccaacagaccctaccaggctgcgggaatgttgcggccctgcagggcgtctctgtcttttttgaggtgtctctggtaatatgtgataatgacagtatttttagacatttggaatctgatttaaattttagctccatcaccttctagctgtgggaccctgagaaacagcacatcctcccggatcctcccatctctcttgtccacacgtggggaaggctcctggtgggggggggttgggggggaggggggaagggggggttggggggagggggaaggggggggccttgcagatttaccaagctgatgtacaaagacctactacagcggtaagggctagctcctttctcccactctggcagtcactccactttgagaaacatacatcttgaaataaagctacaagtggagaggggcaggtgatttgggcaaatgattccatactaaatgttaggacaaaacatcctaggcaaatatcacaatccggcgtcatagtggcatactaaattcaaccaagaaatatacccatgatgttgaaagagccaggcttatggaatgtaaacagcaaactattttattcttgttttctatttaccaattcaaacttactctgcaggtcactcctccctgcccctgggataaaatctagggcatgttctgtgactttctggatcacaaaattcacatgatttttggatcattctcagttaaccaaaaatgtgtcctgtaacttctagctataaaaataggctctgttcagcatttaaaatgtccaatcccatgtaggagtctaaactttcgatttcattttaagtttaagcttcctcttgattcctcccccaagtctggcccaggcttgcatttggctccaggcattgggcgggtagcagtgtttcctctccatttttcactttcactcttccctccccaactagcttgcagggatttctgatcacctagtagagtctagaggcgtaagggaaggaggtcaccaaggggcaggccaggctttatgtgaatagtgctgttgtgagccaagtacttgagtacttcgaggtccccttctactgcagacatcttccctatggttcctgtgacccaggtttgtctcagagtggggttagcacacggtaccatctccatcccctttaaaagtatttattacatttttctggaaatggaagtctgggaattatatttccctgatagtcttatgagcaggattccaggttgattctgccaaatgtgaggcactcaggtgagactagaaagcagaaagatggtttaaaaaatcatcgttttcttcctttgactctgcacttatgacagcaggatgctcgagactcttgcagtaatttgggcaaagatttccacagtgcaaaatagaaaaaacgtaactggcaaatagctgtacaaattacagtccattttcatcatggaatgtcagtttggcaacaatggcatcgaggcccaaaagcagctctgcagtaggggggttcctccttggtgactggatgggcacagcgaagcacaaattcctgaagatcccagctccaggaaacatcagcatggttcattgcgttgtccacctgaattcttcacccctccctgtggctgtgtccattgccctgtagtgttgcagttcccctcaggaaaaagatatcatttacttctctgacccttgatttggagcttggctatgtgacgtgctttggccaatgggatattggatgacataacataaggagagacacagatatgcatctgcacaatgcagcttgcctttttatgcttctgccttcaccatgaaaagagctttccctgggggtagcagctgtccctgcagcctgtgttcagaatgcacaaatgtgaggagccaagcccagccagcttgaaagtgagttgccaggcccagcgcagtggctcacacctgtaatcccagcactttgggaggccgagacaggcagatcacctgaggtccggagttcgagacgagcctgaccaacatggagaaacccccgtttctactaaaaaatacaaaattaggcctggcgcagtggctcacgcctgtaatctcagcactttgggaggccgaggcaggcggattacctgaggtcgggagttcgagatcagcctggccaacatggagaaaccccgtttctactaaaaatacaaaagtagccgggcgtggtggcacatgcctgtaatcccagctacttgggaggctgaggcaggagaatcgcttgaacctgggaggcagaggttgcggtgagccgagatcacgccattgcactccagcctgggcaacaagagcaaaactccgttgaaagaaagaaaggaaagaaaggaaggaaggcagacaaaattagccgggcgtggtagcgcatgcctgtaatcccagctactcaggagactgaggcaggagaatcacttgaacctgggaggcggaggttgcagtgagctgagatggcgccactgcactccagcctgggcaacaagagtgaaaccctaaaaaaaaaaaaaaaagtgagttgcctaccctagctcagaccacctccagccaacccacagatgtgttagaaatgagtgcttatttaagtatggcattgacatgttgtgattagttgttatgcaccattatagcaaaaaaattgcacactgataaaagtaactgttccctcgttggcttcaccagctttcccaagaattgtttaatcccattccctgtataaaatcactctctgctgagaatcctttttctgagaaaagaattctgagaattttttttctgcttgaggcagaccaacactcattccaagaacaactggaaaggctgaataaaacacagaaaacttttttaaaaagtttttggaaagcttcccagttaacaaacatttgaagggtcataatctcaaaagaagaaaaacacaaggaggcaagctggccctctgtgaactacttttcccttcaggaaacgtgctgattttagctaagaggccgagcatttgggcagacggccatagctaagaggcagcaaaggcagcagagtcgtcttcagctggagagacaagaaatggagactgaggttgtcaaggcagctggaactgaaggggccgagatatcatgtagaagggagacacagaaaaggaacactttccccttgaggcatctgctgagttaagctatgcagaaaggctatgaaaagcagcaggttttggcagtgtcatattaatgagataaaagttggagttcaggacccaccaaggaaaagaagcctaataatcacatcagacactcagttggaatccttggaggaccacactctagatagacgggcaaaccagagatggagatgaagccttccaaaaactgcaacatagactctagtcagttcggtaccattggattaaggtaaaatcttcccactctgtctatcagatgacatggtaaaccctcccttgagacagacattgttttcagatcatgtttcctggagccactaaaatttattataatggttagcattcaacaataagtgatcaaacacaccacaaaacaggaaggaggggaaaacagacacaacaaaacggagccactaatgacccagatattggtgttatcagacacagacttgatgggtggaatagagactttcatcaaagaactggaatctataagaaagaatgaaatggaaatttaaaacttaaaaatacaataattgaaattaactacttagcatatgggttaactacaattagatttagcagaaggaacattctttgaactgtaatataggacagaataaaaactctaagctgaagaacagagacaaagagtatggaaaatacagcaaagaacataagatacttgtgggaggtggtgaacaggcctaacacatatgtaactggagtcttagaagggaggaagatggggcagaaggaacagttaaataaatatagcctgagaactttccaaaactgataaagctttatgatccccaagcaggataaataaaaacaaaactgcatccaggcacactatactttttttttattattattttttgagacggagtttttctttgtcacccaggctggagtacggtggcgcgcgatctcagctcactgcaacctccgcctccccaaggtcaagcgattctcctgcctcagtctcccgaatagctgggattacaggcacgcgccaccatgcctggctaatttttggattttttagtggagacggggtttcaccatgttggccaggttggtctcaaacttctgacctcaggtgatccactggccttggcctcccaaactgctgggattataggcgtgagccaccgcacccaacccaggcacactatacttaaactgctgcaaatgaaagacaaggaaaaaacagtaaaagcagctagaggcaggtaggagggacacatttcttcttttcttttttcttttcccctccctccctctctcctccttcctgcctccctcctgtcattttcttttgtagaggggggggatcttgctctgttgcctgggctggttttgaactcctgggctcaagggtgctgggatgacgggcgtgagccagtgcatgttactgacacattactctcaaaggagaaacaatagcactgaaaatcacttgtcaacagaaatgatggaagtgagaagataatggagtgccattctgaagttcctcaaagaaaaaagtgtcaacctgtaatcctatattcacaaaatatacttaaaaatgaatttgaaatagatgtttctattcaaaaactgagaaaggctgggtgaggtggcctgtaatcccagtcctttgggaggtcaaagcaggcagactgtttgagctctggagtttgagaccagcctgagcaacatggtgaaatcccttctctacaaaaaatacaaaagaattagccaggtatggtggtgcctgcctgtagtcccgctactcgggaggctgaggtgggaggactgcttgaacctaggaggttgaggctacagtgaaccatgatcatgccactgcactccagcctgggcgacagagtgagaccctgtctcaaaaacaagcaaacaaaaaaacacaaaaaaacctgagaaaatttgctgccagcagatgtgcatacacaaaaaatactaaagggaattcttcaggtagaagaaaactgatctatgatagaatcacagaaatgcaggaaataataaaaaaaaacagagtgaatatgtgggtgaatacaaatgaatattgactgcacatagcaataataataatgtctcgttaggtgtaaaatatatgtgaaattaaaatgagtaataataatatacatgcaagagtagaatggaggtaaatagagattgagtattgtgagatcatagcattgtctgggaaacaataaaaagtaaaatttgtattagattataataatgtacagaagttgtaatctgtggaggaaaccactaaagaaattataaaagaatgtgtaagtagaaccaatggtagggggggaaacggaattaaaaaaataatcagaaagaaagcaacagaaaagaaaaaataaaaacaaaaatgggtaagacaaatggaaacaagtagtaagatggtatttatgaacacaactatatcagtaattacaataaatgtaaattcacgaaatacacaaaagacaaaatttgacagacttgattaaaacaactctattcaagagacatgacatcattataagaacattgaaaattcaaaaataagggggaaagtgaaaaaaataccattgtgagtggtagagaaagccatttcacataataaaggttcactctaccagaaaacgtcaattttaaatgggtatgagcctaataacacaacctctaaatgcataaaacaaaaactaacaaaactcaaaggagaaataaacaaattcataataacagtggcaggctttatcctctctcagtaatttatagaaaaacagacaaaaatatcagtaaagatgtagataatttgaccaacctgattaacaaacttgacccagttgaaatacacataacacctgcacacaactgcagaatgcacattctttcaagtgcaagaacattatgataagaatattataggaaagtctgtcataaacatagcttatataaaaatataacagcaaattaatctaaattttatttatttatttacttattttatttttttgtttatacttatgtcataaacatagtttatataaaaatataacagcaaattgatctaaattttatttatttatttatttacttattttatttttggagacagagtctcgctttgttatccaagctgtagtgcagtggcgtgaacatgactcacttcagccttaacctcccgggctcacgcaatactcctgccccagccctccaagtagctgggacaacaggcatgtgacaccatacctggctaatttttgtggtttttgtagagaccgagtttcaccacgttggtctcaaattcctgagcttagacaatctacctgccttggccttccaaagtgcggggataatagatgtgagccactgagctcgacttaaatctaaattttattttattttattttatggccatgctccctctaataaatctaaattttaaataaataagtccaagtattgttgtgtttatgtgtataaacctgcgcacacacacaaaagtgtacacaccctgctggtttctattacaagaatgttaagtttggtttgacattcaacagtcaattagtataagtcatcacatccaaagaataaaggagaaaaataaaattatttcaaaaggtgcagagtaagtatttgagagaaatttaaccttatttgtaattaaaaaaatctttttaacagcttgagaatatatgttaatgagtacattaaaaatcctataacaaccatcaaacttcatggtgaatattgacaactctccacatgccacacccaccacccctgagattgaggatgagacaagaatacccactatcactacttatagtcagcattctgctggaggtcctagccactgcaatttgtataccaattttatatcttgcaaccttgccaaacttattagctctagtagtttttttgtgtgtggattccttaggattttccatagacaagattatgtcatgtgcagatatagttttacttctttctttatgatctggatcacttttatttctttatcttgtccaattgctcagccactgcagtttggcaagagctaaataaggcataaagattaagaaaggaagaaataaaactgtcattcacagaggacatgattatacaaaaataatctgcaaattattacaatttaaatgaatgtcacaaagcctctcactggataacaaggtcaacatagttttgtagcaacagaatctgtatatactagccataaacaaatataaaacgtctaagaataaatctattgaaggatgtgcaagaacactttactgaaaaccacaaaaatagttctgagaaacatacaaaagacttaaagtgaagagatataccatgttaatgaataggaagattgaatattttaatgatgtcaaatggcccccaaattgttctacataatcaattaaatccaatcaaattctagcactttattttgtggaaattgactagctgattctaaagtgttttatggaaatgtaaagggcttctttcttctggagttgccttgtggacaggatttgagacaacccaggccaggtttctctggtccatgggaagcatgcgtatgctttttgccctgactatgtctgtagagaacagcccaaacaacaacctcctccccatcagagcagagagccagctagtctcttgccatttagatttttcagggatgagtcagagataccagtctactctgtcctgcagaaaaggatacttatcaacttttccaagcggccctagaaaagtcactgctagtcagaaatctcaccttggaatgtgggggtggctggcatctatccggatgtcagatgaaacagaaacagttccactgtagtagcctgctctataaacacacagagaacccctattacatgtgagctatgaagctattagaaactacagctttgcggactactttgaaaatgtgcaagtgggccgggcgtggtggctcacgcctgtaatcccagcactttgggaggccgaggcgggtagatcatgaggtcaggagatcgagaccatcctggctaacacagtgaaaccccgtctctacttgaaaatacaaaaaattagcagggcgtggtggcaggtgtctgtagtcccagctactccggaggctgaggcaggacagtggtgtaagtaaacccgggaggcggagcttgcagtaagcctagatcgcgccaccgcactccagcctgggcgacagagcaagactccatctcaaaaaacaaacaaacaaacaaacaaacaaacaaaaaatgtgcaagtgaaataagtgacaaaaagcaaacacaagatattctgttcatacgaaacactgcgaggcgacacttgtgtttgtagattgacagaaattggaggtggagttaaagaggtagaaactcagtataacattcattgcctcttttgctaaagttgtttcactgcataagaaaaagatactggtcgggctgggtgcggtgactcatgcctgtaatcccagcactttgggaggctgaggcaggtggatcacctgaggccaggaatttgagaccagcctagccaacatggtaaaattccgtctctactaaaaataaaaaaaattagccaggcatggtggcgggcgccagtaatcccagctacttgggaggctgaggcaggagaatcgcttgaacctgggaggtggagggtgcagtgagccgagatcacgccattgcactccagcctgggtgacaagagggaaactccgtctcaaaaaattaaaataaaaaaaaaaaaaagaaaaagaaggaaaaaagagaaagagatagtggttccatgtgctgttctagttacacaaaacaacgtgttgacgtgcaggctgcacgatgccaggtgcaaatacacactacctgttacagtaactgtgacaagcacaagggctgctcactagcttgagtgcaacttctggggagttgatggcagtgatctgtgggtacttccttcttaacaaattttacatcaatactgcaacacagcaatctcagccctgtgggctataccatagccacatgctttcaccatttcctgctcaaagggagagcccaggaactgaatgctcttaatcagggagagcacagaaacagcagcagaacagctggagaaccagggctgtgtggttttggactgtggggagggtgggccatgggcagacttgacacaatgtgggagggcatttgacacagccccgtggaggacctaatgctcggggaggccttcacccagcacagtgagccatgccgacacttggtgcctgagtgcgctggtcacagcgccctccctgtgattttccccatagcagtgtgttttctctgccaggcagaaggcagagaaaccctggctgaaaaagcagtgagggtcatcgactgcatgaacacatcatcagctttcccagatggaggcacccaagtttaccctgcaggtccattcagcaggtagagctgggtcatcactaaacaggatctttcttctgagcatctgagattctggtccaaatcagggctgtgaggaccaggagccgggattccgagcccaggcagccccgcagataaggaggagggagtgtgtcggaaggctgtatggccagagccgctgaccgggccagggcttctttgtcccctcttctctcctgcatatcagcactcacgtcctcctggctcgggctggctggcagctcggggagctgttggatgaaacgtccatgcgtgtggctgtggctgtcacatgcaactgcgaggatggtcggctcccaaagcggaaccgcggtgctgggcgaagggtcagggctccgtggtgcggcagagcgcatgccagcgcttcaccagctccttgggcttgctgagcatctcgtcccagtgctccagctctctgccgcgggtgtacatgtaggggcccaccaccactcggcccagctgctggctctctgcaggggagggagagcaccggtgtgctcctgagcacagaagccccgtccccagtgacctcctttcctccctcctcctccccaggaggaagtagcaactcccctcctctctgagtgggagctgacaggccccaaaggggccctgcctttgctctgcagctggaagggctgcttctccccctgggagattgggaggaaggagagccctgaaagactctctccttgagggccaccagctctgccccacacccttctgtggggccgtattaagtctaccttatgccaaagagctgagggaggaaagggcccctctagaaagaaggcctcggccatccgagagtacattcagcagtaacattcactggccaccgtggagaagggtcttaagtccaggccatgtggccagccacggcctgatggctctgtttccccagagtggcagtgggtgctggggtgtggggcagtgtgggagctggctgacagaactcgcccagaaccccaaagtctcatctggagggcacgaggaaggtcagagcaccaggtccctgggctggtggcaggcctggcccctcccactctctcgggtgatttgctccaggagagggcagcagaggccattgcttaacctctttctttttcttttcttttcttttttttttttttgacagagtctcgctctgtggacaggctggagtgcagttgcaagatcttggctcactgcaacctctgcctcccgggttcaagtgattcttctgcttcagcctcccgagtagttgggcctacaggcgtgcaccaccacgcctagctaacttttgtatttttagtacagacggaattttactatgttggccaggatggtcttgatctcttgacgtcgtgatccacccctctcggtctcccaaagtgctaggattataggcgtgagccaccgcacccagccaacctctttttttttttttgagacgaagtctcgctctgttgcccaggctggaatgcagtggtgcgatctcggctcactgcaagctccgcctcccaggctcatgccattctcctgcctcagcctcccaagtagctgggactacaggcaccagccaccacacccagctaattttttgtatttttagtagagacgtggtttcactgtgttagccaggacggtctcgatctcctgacctcgtgatctgcctacctcggccttccaaagtgctgggattacaggtgtgagccaccgtgcccggcccttttttttttttttttttttttgacagattcagcagcctcgcctcctgggttcaagagatcctcccacctcaacctcccaagtagctgggattacaggggtgtgccaccacgcccagctaattattgtatttttagtagagatgagcgtttcaccatgttggccaggctggtcttgaactcctgagctcaagtgatccacccaccttggcctcccaaggtgctgggattacagatgtgagccagcatgcccggctgcttaacctgtttctagggtgccacagacagagctcaactggactaaagctgggcctgaaacccaggccttgggcaatatttcagcctttctgagcactagtttccttaaccagggagggagctcgtacagctccttctgaggtcaggacaggaggcactcactctgcctgaacactcggcagcccctcgtggtccccatcccagcagcccagggtagggtgtggccttactgtccccttccatgttctgcaccacagtcaggctgaggctagcggtatccagctcggtggcatcggccttgaagctgaaggtctcattgtacacagggttgatggagcccagcacagctgaagtcttcttgcacttgacaaacttgttgtggttcatcagagacactttgacaaacacacctagggaacggtgagcactagtgggctggcagaggcaggtgggagcagagcccctgcctgtgggaggtccggctaggagggcacgtgcccaagctaggtgccagggccccacccctcacacagtgctgcggccccgccggcgtgaccagaggaagccggctgaggagtgcactgccctgcggcccaggcggggctccgctcccttccttttccttcctctttgcatcaggaaagtacccacggctcctgcaggccctggtttaccagagcctagcaccgcaagcctgtccctccctgttggggggctgctcactgggcccccaggccccctggggccccttaaacaccttgtacagagggctaagatttggtgggtgagggtcagagtcacagtggaaggtctggatcctgcctggcttacggtgaccccagatgtgaacacaaacaggtggctgaccaccacctcactgggatgggtgggatgtgtggggtgagcccaaatggggtgggacatgtggggtgaaccaaggcctccccttctgcagctcctgtattctgggaggccaagcatcagtgcccattgagtcgggggctcttcccctgtggggagggaggtgcgggcctcaccctggaggaactggacccatgccgctgatggaaaggtggaggtggaggcaggcaggacagttcaaagagccaagacgctgcctcgggaaacaggaggggcagggcctggtattgcggctgggttagaaccctccgtaggggaggccaaggagatgcagctttgggttcaacacaggaagaggcttcctgcaccagaactgtcgaccgagggacagcacgtcttgtgaggtagtgagcgctccatgataggtgtatgcaagcagaaactggatggtcagggatgaggttggactgtagccccaggctgtaagctcggtgggtgggaccttccccaggaggaaagggaggaactcactgacaatgcctctgtcctcctggagccggaggcccttggcacgcagcacaaccaccgtcaggcggctcaggtagtcgttgtagctgaggcagaactggaggtcgccaaactccgaggggggctggggaggccaagatggaagcaccccaccctgttactctggcaagtgctgaaggggtcacagaacccccagagagcctcccgcttcctcctagcggtccatgcgacacacccgcatggtcccctttgagttccactgccattttaaggatggggcaactgtggtctggagagtttaaggggcttgtgcagtcctgtggaccagagctaaggagtcacacccaggtctgagccagctggggccttcctgggggtggtgggctggaggaaacatttccctgggctggaccatttgtggtgtcatctctcacagctgtctaacctagataagaatccaaatgtggatatttcaggttgctccagggggtctgatggccagtgtgacaacaggacctcaagcaggccctccctgcccaggggcaggtccgttcccacctgtcccatgctgcttggggcctgggccctcctccctgagtcactgttgtagggtggtgtgcaggatgctgagggctgatgccgccagcaggtgctgggccctgtgcacacctgccagctgatgctcagtggcataggcatggtgaccttgaccatacctccaggctctcggcctccaggtctctccagatgacacgccggcagtcccccactagggtctcattcttcaaggggaagagcacctggcccaggagctggtgcttcctctgcctgtccacgtggtagacggagaacttcagcaccctctgggtgatggtcttgctggacacctgggggggacaaggacaccagccagagtcaggcgtgggggtaggggatgggatggtgtgacttgttattctggacatgggtgcttttgggaacgggtgtctcaaccagggacccacatcccccaaacctaggcattttcaggggacccttctcagcagcagagccgtgtacccctggaaagtgggggtaggtgccaggaccttggtacacagagtgtggtccgaggacctgtagcgtctaccaccacttggagccctgttagaaatgcaggatcttgggccccagcccagattcatgaattggaatctgccgtttaaccggagcaccaagtgacatggctgcacggtgagtgtggctccgccaccaccctgcactgtagcaaaggcccaggagcccagggcaccggcctgtctctgctgtcagagctgggcatgccagctctctcctccctgagatttggcctcctcgcctgtgaaatggggattatgggtcttcctctctggttgtaaaaccccaatcacagtgtctgacctccagcagatggcccattaatattgattttcttttctttccccttctcccttttccacagagggattggatcaagctggggcgagatagagtggggaagtgatgagctaagaaaaattagcctgcaagcatgacgtgtcgcacgtcagcaaggctgcagccttggattctgatgtcttgagaagagcgattcacctgtgaattctcacagccctggcctcagaaagacggcccgggaccaggcccgatggcacccctcttcccagctctcagccagggcggaaggcacaagtgatggccctggcctccgcagtcacactcctcctgaaagctgactggctgaacctcacctcttggctagcttgccacccagctcttgagaacatgtttgtccaaggcctcttggcaggtctcgatgactccttcccctaagggcccccagtcacctgctaaggctcccaggcccctgtgaaactggctcggtgccccaatagactctccacctccagaccctaagccggccagcccagagtgcagcaaggcaccacacctaccctgtgagggcactcgggccccgcgctggcctctgacagcacaggaagcttctgcattcacgctgaggcctgtcttttgccttccttagataaacttgccagaaaccccatagtgcttcaggcctttgggataattcccctgagccccataggccagggcctggcattcagtagttgctctaaaattgtgttttcacccactctcttccaggtagtcaggacagggaagcccaggcttctggtcaccactcaccaaatctctcccctgcccctctatcagggatcagctcctataggccttaacctagcagactaggtaaagcagagctggtggcatcaagggtcccgggggctgcagagccctggctggtacaggaggctgggctctcctgtaggtctgcaccttcccagcaacgcggagggcaccagaccctgcctgctccagaggctgtacctgaaagatgaagtgctcgtcaaactgcgggttggaggttttgcgtttggtcttggattggaggaagcgccgctcatcgggcagcaggtagagcttcaccagggggctgcaggtctccgagggggcttgcaggtgctgtgccttgatcaagcccaccagcagccgctcagcctcctgctcatattccaccgagaaccacagccgccccaggcagccgtcggggaagtcggtctcacttttgtcctccgggaacttgtacagctctgggttgatggcccccaccatacatgcatctcctatgacagagggtgggagggctggcaggccagaggaaggcaggggcatgggagacagtggcaagctctgggcacccatccccatcctggcccatccgtctctgctgagcctcagctagcctgaccacatctgccccactctcctcaccaggctaaacacatcccctctctctggtgcagctcctccaagaagccttctcaccatgaaggcattgcatggccaggctggggatccagcagagtcctgccccctgggattggcccccatccttggaggtcaggacctgtttcaaggacacagtgcccatcacctggcctagcccccttccatggcgtctagggaatgactcagcgataaaacattgcctttcttcttcctcttcaaattagaagggccaaggtgattattgggtggttcctgtgatggtctcttggtagatcttcagggcaaagaggtggcagaaagctgtgtttgcagcccctaccattctgtcctcttggtcaaccaacccatcatcctagagtgggacccagcacaagttctgtacatggcgtgcctgggttccaattccaatctgttgcttacagcctcagttaagactatgtaaaatggggtgataattcctccccctcagagtcatggtgaggtctcactccaaatcagcacccaaggccatatcttaccctcatggggtgcagcaagcacttcataaatgaaagcacccagaaagagtggtccctgggtggtccctggcatccctggctggttcaggttgtgttccggagccaagctggtgaaagcagatggggccacccgagcagaccctgacctctgggcagccctggcaaggacactcaccaaggccgccgctggaggtgtgaggcagcagctctgatgccgggcaggggtcccatggggcatcggcccactctccactgtgcaggggcacccaatctcggccttgaagggttgggggcaccacgaatggcacagctggtggcctgtccagagtcagggagacaacatgtaggtggcaagtcaatggtgtggtctcagagcgctcagccaggacggttgagcaccaggggctggaggaagaaaagccatcgggagccaggaggaggccagggcaccattttctgggcccataccaggcaacacacacacacacacacgcacacacacacacacacacacacacacacacacacacagcagtgggatttgaagaaggaacacagcacctgacagtgtcagccagtctgggtttggattcctgttctgccacttactaattgtgttctctggacctgttgcttatgtgcactgagcctcagattcctcacctggaacatgggtttcataacacctgcctaatagctgatgtgaggtttctggggtttctttgtgatagctcccagcaccgaagcagcatagaagaggcacccccataaacagaactttccttttcgaccccaccctgagggaaattccaggggcgcacttggccccacatcctgcctcacctgctcagttgggtcctagcatgcggctggcagggcctgtcccgctgcccactggaggcagctgtggtggccatggctggtgtcccaggcagctcctcataggtgagggtggcacagaaccttctccacagacagcagcttgccccgatcaacagcagcagcagcagccccccgatggtgcccccaatcaccagggccagctgctctgggggcagagaccaccagtactatgatgcctgcctgggaaagccactctccctcacagccctggcctgctggggcagaactagggcagcaaccctgcctctgggtttgatctcaggagtgataggagcaggcctgctggggatgggttccgggagggatgctgctggctaggttccgccagctctcagaggagaagccgtttaccccagggtctgagagccctgggcagaaccttctagttttccttggaaaacagctggccctgcccttgggattctggcttaaagaagccatttccttgcgcttctgagtagaaatcaaacctgccctcaccagaacctccatatcccctgggctcctgttgaggccaggaggggagctggggtgtggacgcagtcagttaaggaaagccctgaaaggtaccttccccctggtctgcaatcaaacctctaccctctggggccctggaacctgctgcaaggctggactcttctctaacacccgctccctcccctagccctctatcaaggtgagcacgcgcttaggggagttggtgcgacgcggtggacgaggtggggaggaaaagggggcaagaccccgttgctgctggccctcacacgtccgcatttgcgggacctaggaggcttcgccccgggggtgctcagacgctgggttccaaccgctggccacctggggcgggccaaaaaggtgcctcccttagggtgacgtgcggccgcggggcattcaggtctcagggatctgcactgggtggggtggtgagaaggccggaccccccacacctcctaagccgcaactgaccgcgaagagcgggcctcagcgtctactccatcccagtgcccctccaagagcgcgccgaggccgggcagggcaggcgctgcaccccagcgggggcggcggggcggaggcaagtgctggaagggtcgcagaggggccggggctgggctggggaggcgaggctcgcttacccgccatggggctgctcccgcaggctggtctcgccggtctgggcggctggggctgggctgccaggccgtctcttaaagcgccgcggggcgccgtcgggcgagcacaggggcggtccgtggtgctgctggtgcccagctgcggcgcggggagccgcgcagtgcacggcaggggcagggacccagcgccccgaggccgcagtcccgccccagcccgtccctggcccaggcccaggcccggcggtggaggggcgcagagccgaccgtgagctcccggaaaccgcagggctccagccagggcgggtcccgggcgccaggggcgccaggggctccctgcggcttggggcagggtggggtgagagtaccacccccatcccggagagcagggctacagccttcaccgccgcgtctgacacagggctccgcacccgacccctcacacctggtggccaggactgagcccccgccctcccagatcctcctcaagccgaggcccctccagccgcagctccgaccccggctcgggggagccttcccggatcccggggtggagtctccgcgcgggtccccggccccagcgctgcctgcctgatggccttgggcagggatgcggcgctcgcgcacccgttcgctctcagcggacaaaccggtcgagagcgcaattctggagcgggttccagaagctcctgggttccaattcaggctcctcactcgccagccctgcgatttgggacaacttaacgttcgtaagctgggttcagtcttctcaattgggttaatgtccgtgaggggctctcgtaagggcggctggcctgccggtaacttaagaagcatgtaaagagcacttagagcggaggagcggcgcggcccagcccctgttacggtggttatcggatggaggccagcgtcgcctgggtcccctctgtacacccagcgcctattattatggtgattattagaacgcagggcccgtgcccactagtccaggctggcgaacgcgccttgcgggaaaggcgggagtaaggtcgctgcgtgtcctctctggtcacacctcggcgcgccctggtcgcgcccctatggttcccccgccgaggcctcgaggcgtctgagtggggagcgaaaggaatgtgtgtatctgtggtgcaggggagtgtgtgtgtgtggggggggggagggggtggttgtgggggagtgcgtgttttggggggatggaccttctcgttttacagccttgaaggttatgtccagagtcatagcctgggtcccacacccccgcgtcacctgtgcctgtcctagggggcagtcagtgtgcgtgaggctccaccctgcctgggctttggctcacctaaggcgaggagggtggtgaactggggtgccccactgggccgggtctgggagccctcagcgccagggtgcagaggccgcagccactccccttctagggtctgggcggtgggggcatgagaaggcggagacccaggccacttcacccagtaactgtcctcagctgtgcgcttaactggcgagatctccgctctacttggagacagtctggggtgtctggagaatcctcccccacttctgcttaccccaggtcgctgtgggagcaggtgtctcaggaaatggggcctgggtcccacccaaggcctcgggtctgagttagatgtctgtatgtttgttgttgcccctgcaacaaagtaccacagattgagtagtttaagccacatgcatgttatctcacagttcggggggtcgggaatctaaactgggttggcagggcctgtgccttctggaggcaagggagctgtttcccagcgtttccagctcctagaggctgctagctagtggccctttcctttgtcttcaaagccggcagcacagccttttctaacctctcccactccaggtcatttcacatcaactctttctgcctccctcttgtaagtgtgataccctaccttgttttaacctgaattgactgtcccttagctgagagagccagacacactccattttggctccttcacttgcagccccttacccaccccccttcctcaaggacttaacttgtgcaagctgactcccagcacatcaaagaatgcaattaatggataagatactgtggcaagctatatccgcagttcccaggaatttgcccagttgatagtaccctaagcccccacatttgtgtccggttgatggtacccaaagcccccgcatctatcgccttgtgatggatttaaaacccctgcacctggaactgtttgttttcctgtaaccatttgtcttttaactttttgcctgttttgcttctgtaagagtgcttcagctaggctcctcctcccctttctaaaccaaagtataaaagaaaatctagccctttcttcagggccgagagaattttgagcactagccgtctctcggttgccggctaataaaggacttctgaattcatctcagagtgtggcgtttctctataagaggctcatcagataatccaggataaccaccacccccatctcaagatcattaacttaatcacacctgcaaagccccttttgctatgtagtcacggggttggggatgaggacttgatatctctaggaccattgtgtggaccatgttgtccatgcagtaccctgggaggggtggcttacatttccccttcctctgtctagagttcagtgtgcctcaacactggactcaggcagctagcaaggctcaggggacccctacatggaacccgtcagctatcttgaccccttcccccagctgccatgcacccccacctgaccaccccaatggggcatggcatccacaccagctgcctccatgattgcgcccgagctgtactcaggctgttctgggggtggagttgggtagtgggatgttttttgaaaagggaatcccttctggcacttcctgagtgccaggcccagagctgccatctctcgacccccatgctgtgcttttccaaagtccccatctttctctgtgtcaccaagtcctgacagctgttcctcctctgtccatctctatcatggcaaaaaaccttgcccagccctccatcacctctcatctggagctctgcatgggcctcctctcagctcttcagattccatgctgcacccactccccttcccagctgttgtcttccaggctcccctcccattctcatcccccccaccacccatctctatgcagtgcttgtgcccagactgatgcagctacttccacggctctgcgtatgcactgggctctcccaccatgctgctctctccctgtctgaaatactcaatgcccctcccaccctccttctccactgctcatgtttcaagatgaacccccagcatcttgccttctgtgaaacccttcatcatcccctccttgtcctcatggtccttgcagctaccatgccgaatatgggactctgtgcctgagactgctgcctcactcttcctggcagccgagggcctccatgaaggcagggggccgtgtcttattcagcttggcatcgccactatccacctccagggctgaggctgtgctgaatggcagatgaagggctcttgccattgggatgagctgccccagcttctgcccacattgtccatgcatcatacacatcctgggctcacaatttagggcccaacaggagctccctgccctggtcctgcagaccagcttctggggtctgcaaaatcacgttgtcagctctatctgcaaaatccttacactgccagccagcccactgagttttgagtcaatcttcctccacgggaagataaaagcaggtggcaggagggagctcatccttcttgctgctcctgatgttctgagcattgagatgcaggcctgatgtacacgatcccatggagccctgcctcatgtctgccctgcagggtcatgacctcctcctcagatgaggaaactgaatcaaagaggtttcctggcccacccactaagtggtggatctaggcctggcacctggctccctcgttccttcttcaccagtgagcagctgtagggcaaggacccaggagaccctctcctgtggcgctgaccgtgaatcaggcaaagagccacaggcactttgggcagcctcccctccatccactgcccgggggctctgagacctggctggcctggagccagctccccagaacagaaaggcatccagggtctggcagcagctctggctctgcttcctgttttcagaccttgttcttccccgtgtctgtggagctgggaagcctggaaacagcagcagacatgggttctgtctttcatggccaagcggaagttttatttccatggcaaaagcacttccaaggagggctgcaggaagtccaagagtttaaagacctgcaaatgcctgcaggtgattaataattcattgcagcagatgattacgagaaaggccactttcaattaaccttaagaatcatccctgtctaaggaagtgtcatctctcatcactgaggaacacagaggccatagcaggataaaggccacgctgagaagcatgtggaagactgtgtttctcaattcatgcaaattgcaccaggtcagcccaggtccttctttgtgaggagggggagggttcccctgccagcatcctgtctgctctttggttctgctatggcggcctcagacttaatttcctccagccccttcttttgaggagcttggagggagtatctttccttgttggatcagaacttctcgtcccccactgaaacatgctggctccaaattgtgtctcctcctgcagacagtcactccgactggcagggtgggcttgggcctgtggctcgctcctgcccctgggcgtggtttctgcttcctgccctgctgctcccctgcctggcaggcctgctcccctgcctcctctcaaccagcaccagaactctgccttccctctggagggaacaacttccttccccttccctgtccacacagtacctggcactcccctactcacccctattctagcgctttgtccatgacccaggcctggctgctcagcctagttcatttctggctgcagtgataggttcagggatgtccctgtgaccccaccccctgcccccgcgagaggctaatcaggatcaacactggaattttgtgggatgtactggggaagagacacctcctttctggcaggagttgttgagcagaaggagctaagtctggggccatggaaagccccacgtggaggagccagagaggatggagccagcacaggtgctgaggtggggacctatgttgtcctggcagcccctgcatcctgctgcatgcagcccctgcccctggaggggtggagagagagggcggcagaggggagtgagcccgccaaggccactgtgttagcaaggagctgagccggcgttggcatcagctgttccagcttcagtctcttgaccaccaaggctgcccctcagcatggagcagaagtcaggaactgaggcaaggcttgtccttcctcaatcgtcacctctgggcactcagctgtcctaaagttttttgaccccccttagggatggggtcttttcagcaagggccatttgtggcaaacaacaattaatttactgctcagcctccatggctcactcctgcccctccgccagcttctgtgctaacaactgacccacatttttttttttcaggaacagcaatgtgctcagtcaccaggcatgcatccaatgagccataagagggcggaaagactttgttttttgatgtattaatatgctaaattgatgtgtcggttaagacatgaagaaattagctatcaaactccaaagagtggtgacagactaagacgcagatttccaaaggtggctgagaacctgctggacaactgtcccccagtgagaggaagggctgagagagtgagggagggaggggatttgccagattcctttcttgagggctggggctgtgatgtggactcccacctcctacggctggccagggctggggaggggggtgtgctcggggagggggctgtgctcaggtagagagggggcaggtggagcagaggacagcctcccctccagcccagagagttggggattcaactctgctctgagagcttgctttctgtcccctggagtttgggaggcagacggactgctggtggaggtgcacaggcaattgtggcttcttggttctgatgaagacagtaggcagctgctgtgttgggaagcagccaggctccctcagatgccagccaaaggtttgtggatcttgggcacatgacacgccactggtagtgcgagtgtggctcagagtgtgatggggaattgtcactgacatgtgcctggggacttgtcaggatgtggaatgtgtacatatttcccacaaccagacattggccatgtgaatgaaagagccggtgtgtgatcatctcagtcctgaccacaggccctacccagagggcatatgtagcacagtggaaggaagtaggaggtgaactttctaggggtagaggagggagcaagtggcttctgattcatttgctcaggtcaagggcactctggttctggagtgggtgtcaggggtgaaggatcgagggttcctttcaaagggcccatttgagcatgaaacctcttccagatctggagaggtaaggcatcttacgagaccgtcaagacagaactttccaaatccccttcccttcctctgctcatgctcttacctcagaagtctgctacgggcagtgagagaggagagaggaggctgaccatggcaccctctccaagggcagaggctgtctgtggctggccctcaccatgggagatggggagacttaactcaagtttgcagatttgattattacctaggtggcctttctgatgactgtcttgggactgcggggacagtggctagaagggaatgatctctgctgaatacctgctccttccaagtgtggcctccatagggagctcggggctctcacatgtcctcctttgttccctcaaatagatcccaagatcttgaacgagaccattttactgggctttagtgctcaaggctgaggtttcacttccataaaaaaatcagttaaaagtgctgagcctgtgggaaggctgttctttggttaccttctgtggtcaattaaacgattggtctcaagttctctcttccctgtactggtattgtactcccacagccttgcaacatggtgggtgcattagactgtttatattgcttataaaggaattcctgagactgggtaatttataaagaaaagaggtttaattggcttacagttctgcaggctgtaaaggaagcatggtgccagcatctgcttctggtgaggcctcaggaagcttctactcatggcagaaggtggaaggggagcaagtgtgtcaagtggcaagaaagggaacaagaaaagggatgcccacttttttaaactaccagatcttgcctgaactcagagcaataactcactcattactaaaaggaggcaccaagccattcatgagggatctgctcccatgatccaaatacctcccaccaggccccacctgcaacattggaagccacatttcaacatgagatttggaggggaaaaaacttccaaaccatatcagtgggacacatgcttccccatgatttgactttgagcatggccacatgacctgcttgggccactggaaagttggcagagatgatgcggcagaggctggaactgcaccgtgcggctggccttgctctcctgtgctttagccaaggcggtgagatgagcatggcccagggagagctggctccaggccaatgagtgctctgtggtgcaggtccaaaccccacctggagcctgagatcaaggagttcagcctgagccagcagaccccagccaacccacagacatggaagggaaaaataaatgcttctggatgatgccatagagactctgtaagcagcaaaagctgagcaaaacactgtcactctcttttgattcctttggtgagactagagctgtgagctggcagggccacaccccttgtcccctctccacatgcctcaaagttgtggctgaaggtggatgatcttgtcacttttccttactggctggccttggtcttctctggaccagcctctgctgctgtgggaggaataaagtgctaaggggtagtgggtttaggggaaagagagaaggcttgtgggggacatctgaggttttcacacagcatactttatccttcttttgttgcagtggtgccccagtcaaaagtgccctctgggaaagcccttccctcctcttgggtgtggttgactccaccctcttcttcttccagctgggcttgattcctccacaggtccctcctcctggctgcagagattggttcagggaaacacagagccaatgagctgcaaggctgatttttctgacaatgctggacagaggcaagggttcttcccgagggtcttgaatttaatgagagaatctcaaatgatgagaaaaaagctggtctgaggacagggtcagctgaataggtcgtacccagagaaagagagggagagagatactggatgctggtgatgggtgaatgagacaaggcatgaagctagaacaccacctggtttttcacttaggtgagcccacaaattccgatgtgtacttaatgccagcttgagtaggtatctgccatttgcaatcacaagtcttcaatgatacaagattgcccacctgctttgggccgtctgtggcccaaatttgtacctggccttattttagggacatacacctttcttgggtttgcacacacacatgtgtgtttacatttggacatagtagaacaaaataatttatataaggattttgaaatgctgaccaaataaataatctacaccaaatactttacttacgttgttttattcattcattctttttaaaaaattatttattctttacaaccaccatctatggcaggtttttttttttgttgttgttgttgttagatggagtttcgctcttgttgcccgggctggagtgcaatggcacgatctcagctcactgcaacctctgcctcccaggttcaagagattttcttgcctcagcctcctgagtagctgcgattacaggtgcccaccaccatgcctggctaatttttgtatttttagtagagatgtggttttaccatgttggccaggctgatcttgaactcctgacctcaggtgatctgcctgcctcggcctcccaagtgctgggattacaggcataagccaccatgcctggcctatggcaggtacttttatcacttaggaaatcttttggttacaatttacagtaaatctgactaaatctgactaaataagcctaaatagggcttacaccataagaagatttgctttcttatttcattagctctaagatgtcattgattgtgaaatgcaccactgttttgcaccactttctttgtataagcaaaacttgctgccaaaccatgaagccattctttactatcaaatcagatatgagaagtgacagtggtgtcagaatgtgaaaaaaaaaaggccttccttggaatggggagaaatggtgttacttagcaagacatttgtggttgggtagcctcagatttgacttggcagctcaacatcatcatctaagatccaggttccttggatgtgtcacctgctctgccaccttcaagtttcgagatggcttggtgtcttctaacaccaagttcaaaggcaggaaaagaaggaaaggaatctgatagggaaagtgtttatttcctcactcacatccctcatcttatcagaaagcctccggcacactgaccctccataccttgttgctcactggcgagacccacacacagccatgctggtttcaaggagaccaagaaagtgagtatctgaccttttcagtcctataatgggagactggttgaaggaagaggacataagaaatggctgtcaatgccacgggatttcaattccaattttacagatgagaaaactaaagctggaagaggttcggcaactcgcccaaggtcacacaactagaaatcggtcaaccccagatttgaatccagtgtcgaatgattcaaagttcttcccattgcaccataaatcatctgtacatgaaagaccgaagactgagaaacctcaaatacagagcaggtaaatagtaaggaacgtgtttggatgaaataccagaacacctgaccatcagtggatcagataggggtttattgttgttatgtagccagcaccccagagatcagcagcccagggtggcacagatgcttaagggtttcatcaagatcccaggctccctcatcatcctccttcaccttctggagtgtgtggtttctgtccttaagttcacagtatggctgctgcgtctcaaggcatcacatctagctttccaagaaacccctacctagtgattccctcttacatctcattggttagaacaaggtcacgtgtaactaaccccagatacaaggaagttacaaggaaaagtaaatatatttagctagacaattgtcatcccagtcaaaactggtgctctgttttggaagaagaggagagagaaattgggtagtggttgtcattagtgaagtgggtatttggccactatatttggttttctttcttctaggcagatggtacaacccttggggttagttaaggatgtgtaacttactttgatcaatgaaatgggagcagaagtgagatgtatcactttctagtggaagctttaaaagttggtgcataaaaagacacatgcacccatatgttcatcactgcgctattcatggtagcaaagacatggaatcaacccaggtgcccatcaatagtgggttggatagaaagaatgttgtgcatatacatcatggactactacacagccacaaaaagaaggaagacctgtcctttgcagcaatatggatgcagctagaaaccattatcctaagtgacttaacataggaacagaaaactatatactgcatgttctcacttgttaaatgagagctaaacattgggtacacatggtcataaaaatgggaacaacagacactggggaatacaagagaagagagggagggaggggggtcaagagtcgattaaaaactgcctattgtgtactatgctcctcttgagtgatggattcatttgtcctccaaacctcagcctcaaaatatacttttgtaacaacctgcacatgtaccctctgattctgaaataaaagtttaaaaaaagacagttggtacattgttccccaagttcttttccattgatgtgatgactgtaaaagcaaatgccaagagtcctccacgatgaacagagccctcttgccaaacctgtgataggcatagagcaagggtgggaaatagacttgtgtttagttaatccactgctatttttgtgaggtcgctattgcaacataacccagactatcctgacacaggtcggcaatcagcagtgtccacacatagtcctcaagcaaggtcatgatcagaccagggaggagccagggcctaagcctgaactggcataaacagtgccccaatttctccaaagtgaggactgtgccagtgggcctcaagacaagaattgggagtccacagctcccagacactggggaccccctcctatctggagctgcctggctgccacatatgagcctggtgacccagccacacccaccagctagctcatcagcagtgtccatgtcattatcgaggcagagaaatccactcagcgaggatttcccacgttagcccagcatccttacttctcgctcatagtaacagaaaccatgttcccgcctccaacagatgcactgtgctctgcactcccctggtcagcgggtgggtgcatgatgcaaactgggccagtcagatgctttcattctgaaacttgaatcttgagtgaaataagccagactcattggggactgattggaatttactcaccccggtggaggcacatggaagaggcccgttgggtcctgctatctatgtcctcagagcttcacttaccacagttcggagaggacagcacatcctccaggggttctgaacctgaatgcagcaactggttgagaacctgagttctgcgctgtcttctgttgcagtgggagtgagtagggttttggtggtatatggtataactgccttatcttgagaaagaatattttaacagctgtgtttatgtcaagaggggtatgtgtaacattcaacaaccaatgctgcagattgcagaggacatttgttgtttttgcctgctcagcatctattcttgctgcttctggtgacaaaattcagtggtcccatttctcttttaactccagagctagatttgatccagacctggccagtcagagcatcacatgctgcaggcctcagtgagtggttaggagctgggcagtggcctaccttagtttactatgacttgaacctggaatttgtgggcaacttttgggagccataataacagtaatggcagctgggctcacacctgtaatcccagcagtttgggaggccgaggtgggcagatcttttgaggtcaagagtttgagaccagcctggccaacatggtgaaaccctgtctctactaaaaatacaaaaatcagccaggcgtgatggtgggggcctgtaatcccagctactcaggaggctgaggcaggagaatcacttgaacctgggaggcagaggttgcagtgagccgagattgcgccactgcactccagcctgggcaatagagcgagcctcagtctcaaaaacaaaacaaaacaaaacaaaacaaaacagtaatggctagtacagttaacttggcactgtccttgttccttaaactcttgtccatggacttagagctgtgaggacataaacataatccaggagttcccaagacccactatgtagggagagcctggctaaaagagagaggtgccagttctgatgacatcatttaagctaggggctctggccaagcccggttaccctggactgttgacttacaagaaacagtgaaaagtccctttggtgcttaagccaatttgagttgggtttctgcctcttgaagtcagaagagtattgcctaatacaataattctgtgtaggcatacaagacacatcagtggtggtacctgccatgcccgcagccctagaggaggagacagccagcaggtggccctattttagatcatgtaacagttggacaagagcaagcaaacacctgactcaggctctgaatcaggctggtcaggatttgtgagttttcctctggcattaaagatgacctatgtctatccaatttctcttttttaaattggaagttgagaaacagggcaggagcgagacagccagctgcaagggaagaagcatgaaggatatgtgaagaggtgccactaggaggagctggcgtggtggcaactcagtttcaaagcagcagaaattcagcatcaggagagggcgccagttggtggaaagagctggcagagcacagtcaggaggaaacctgtctaggaagctccatgaagagagggagcaatggctatttctgaagttgtctcgcctattcctgaggacttttcaattctggttcaaatcctcatgcatccttataacaaacccattttttcccccaaacaagttgcaggtggtctgagaccaaagcagacatcccccttccatgttgcctctgtaaccctcccacggtgaccagcgtatcactaaggacacttttggtagcaaaggatggaaatataatgcaaattggtttttaaaaaaggaaatgtattgtcttccttaattgagatgtcaagggatgagactagccttagtcctcactgaggtcaaggctcccgggatgttctcgggaacttgcttctgcacatcctcactttgtccttctctgggcggctccagtatccggcttcatgtaagatggtggcttcatcgccacattcccttggggaatagaatgagtttctttctccagattcccagataaagtatttatcattggatctaagtggggtacacacttatcctgaacaatctctggccaggaaactgatacagtgattggctgaggcctagcatacacccctcctctaagacccacatgagcgtagaggaggtagagtgtgagtaatatctttgtggaatatatgttgaactgctggaagagagacttcaaataagattggcttaagcaagatagaagtttctttctccctcacctgcctgcaggtaagcagcctgggagcccaggtttttttttccccatcttgttgcttctctatccctaggtattgtgatgtgagatgtttcaccatcacctccactgcctagccagtggaaacggaaaaggcggaagaggagggctcgcccctctggttaaaagtgtcacctctccctacttcaatgctgctggtcagttacttggccaaatatagcttctaggaagtgaggaaatacagtattttttttctggatttccgtatctccagataaaaaacaagaattctttaaacataggagatgagtgtgatcgggggcaattagcaatctcagccccagcctgtcccattggccagtcaaatttccatgtgtcccctccccaggggagacaaccctaaagttgcatccagtgcctatgtccagctccaagcctgggacctgtggagggacagcctgcaccatcagatctgatgtggtttttgttttatttttgtttttttagacaagttctcactatgttgcccaggctggtctcgaactcccgggctcaagcaatcctcccatcttggcctcccgaagtgctgggtttacaggtgtgagccaccacaccaggcttctggatgcagttctttatggtgtgttgccccggaacccttacatacattgcctgcctccttacacccaatatgcaacagccagtaaaaataagataaacatggtgggaaacctcatccagaagagggaaaaacacacccaccaaatcctggtgggcagaaattgtgaaggctcccagggagtggagcagagtccttggatgacagcgcctctctccaggagtattccctgggatagacatctttggaccttggtggtcccctctttgtccactgccttccatggcacaactaaagggcatcaaacggtgtatccctcttagggctatacagcttaaacatttttttttagagagaaggtcttgctgtgttgcccaggctggactcgagtgcctggggctcaggcaatcctcccacttcagccttcagagcagcagggactacaggcacatgccaccacactgggcctgggctgcatagcttttgcagcccactttttgcaggtgcaggtttggtgggtaggggtcggttgatttaaggagtcaaaaatgcagacttgtaccagccagactcatggttctttggtaacacatgccccttaaaatctcagttggctttctgcctatttgtggctagttatcctctggggcaagtacaggttgggtatcccttatctgaaatgctcggggccagagtgtttcatatttcagattttggaatatttgcattatcctggctgaacatccctaatctgaaaatccaaaatctgaaatgctccaatgagcatcatgtgtgctcaagaagttttggattttagagcattttggatttctgggtttttggtttagtgatgctcaacctcctttagattagcagtatttaagcctaaaaatggtggccttttatttatcagcctgtatgttatatctattcacctccctctcaacctgagaccagcgaaaacactcaacttggactggaaggcagcttccttgatctggtctttgtggccgagcggctgtcattgtcaggttgagaaacgtaatcaagtgtttgagaaagactagggtccatagtctcgtctcctgctaatcctgcttcttcagaaaattattctatatctgcctcagtttgtggtacagaagcaatagatttttctctttatttttttaaataaatataattttattctaaaggaatattattatatggcaacactttgagaaccataaaggtgcctttgaaatgttgttagaaaatcacttaaatcatattttttattaataaattgatgccattttcaggcacagtatttttttgggcaagcactgtacagcataattcaaaatatacccatttacagaatccaattaggtatttttctgctcacaattatatgatggctgatttctgctcacaattatatgatggcggatttctgcctacattatgatgtgatatgatatgatatgatatgatatgatatgatatgatatgatggctgatttctgcctacattatgatatataactgctctacagaacatgaaacagaatttcataacatcagttatatttacactctactttaaaaatctttcaagatataagaatcaagctatcaaatatggagtttttaacaagcaatagtttttttttttaggtctgaaaactttttaaactgaggttatagcccataggcaaagggagcttctttcagcactgctgtattctcttcagtatctgccttcctcgggctagctctgtccacgttcttctgggtcatgtaggactctgttgagagtggcaagaagcatccagcaaacacctgcattctgaaatttccaactgtttcctttagagcaagagctgactttgcaaggtattgcaggaatcagttgatcgactgctatggcatggcataaacagggtttccagatcatcatatttatgtatagcatttaaaatatgttttcagttttgttaccagcaacacagcccttcttggtaataattagtatacagcctttactaataattagtatacagcactaataattagtatacaggctttccttctgcaagagagcactcaccccaaatagtgactgaaatagactggaggttaatttctctttcatggaaaacctagttagagctagtccagggctgataggcaaccacagtgtgttgggacacaggctccttctcttttgtcactctgacatccttagggttttagcttcatctgattgatataaactggcttcacaccatgacttcattcctaccaggggagagggaaaggggcgaggcacatttcttctgaagtgcatgaccgagaaattgcaaaaattacttctgctaacatctcactgctgagaacctaatctacagcatgttgggtgcacgatgcctgggaaatgtggtcattattctgggcagttatgtactcagttagaggaattctattactatagaaggggacaataagtattgggggacaattagcagtctctgtctcgggatgatcccccaaatgaaatgggggctggattgtggggagctgaaaaagcaacagatgtctactacaatgcctctcctctgagcactccagccccttctattcccttcaatccttgtgacctaattgtcctttgggcatctgtctcaggtcccctgaatcccccatcatgtaggctttggggccaaggcacctctgatttagcctatattgtcagcttgcagctgataattattattagggactcaggaaaatgtctgtggaactaaattgaggtagtaataggcatttctgaatcaactgccttccattcattcattcattcatccagccagccagccagccagcaaacatctattatatgctaagtcccagggagtcagtgtctttttgtcagacaaaaagacagccttttcatttatggctcttttggctagaggggtctcttgtaccctagagatattttgctagaaaagcagatgctgtttaactgaatcaaagctctctcttccttaggcattgatacatcccaacttagcatttcctcaaagcttgcacagaggctgtccccagcggtaatttgtgctttgggacagctcagtatcaggttcccttagtctggcaacagtgtcttgccctttcctttggggaaccactcttcactagtctctgtgacccactgtcagccctactgcagggccccaccattttgggaagagcagtgacacaggctggtcaattgaagagctctctctctggtccaggattgtcaagtaggggcagtaagacttgatttgtgggttgtttagatccagagatgtgaggatgtagatttaaggttgccagcaactttctttcccaagaggagagagactacggtacctcagtactacccccatcatttcttcttgctctgctattacataaagaagtcacctctttcctcctattgaactcctgaatctcagcccattgaggaccttattgccagtagcaattctggctcctgtatctcctgtccactccttctcaatgggtacttctccctagcagtcaaatgtgctcagttcgttacaatgtgcagtggatacttgtttctggtcactcaggcttcaacctccctgctggggaaaactgtcttgtgagcagtctcggtggggcagtgggtgatcctagagaggcattgggccaggtattcctccaggtatgtcgatccaagggcagagggcatgtggccatagctcggccaaacaaactgccactccactgggattttgaatcttgagctgagagacacaccaaggaccatggacaggaatcctttctgtggaggtggcactggggagcaagtggttcctcctgttgggatctggagtcacctggctcctgccttgaagaacatggctgaaagcattagcatctggagatccctgcgatcttttgacatatccccttttgcttaactttttttttttttttttttttttttttttgagacagactcccgctctgttgctaagctgtagtgcagtggcacaatttctgctcactgcaaccgccacctctcggctacaagctatcctcctgcctcagccttgggaacagggggactacagaaacatgccaccctgcccagctaatttttttttttttttttttgagatagagtcttgctctgttgtctagactggagtgcaatggcggtgcgatcttgactcactgcaacctccgcctcccaagttcaagtgtcctgattctcttgtcttagcctctcaagtagctgagattacaggcagacgccaccatacccggctcattttttgtatttttagtagagatggggtttcaccatgttggccaggctggtcttgaactcctggtctcaagtgatccacctgccttggcctcccaaagtgctgggattacaggtgtgagccactgcgcctggccatccctttttgcttaacttaaccagacttgctttctgttgtttgaaataaaagaaacctactacaggatgcagataataaaacaagcaagcaaacaaaaaaaaatagcattaaaaaaatgcctctcttgaccctacattccttcccaagtgacacctttcttctcccctttatggctgtgtttaaaagaggcatctgcacatgcaccatctctggttctctcctccagctcatcccccaacccacgccagtggcttctgcctctgccacctcactgaaggagcttgctccaagtgccctgtgtcaccatgatgtcccagtttcccactatcttttctgggtgctcctccatcctttgtcacctggtgactcacaaatgggtcctaagccctctcctcactctactctttccctgaagaccttatccacccctgtgacttcagcaaccaccccatgtccatgacacccagacttctgaaaaactccggtccttggctgggcatggtggttcacgcctgtagtcccagcatcttgggaggcagagggggcggatcacctgagatcaggagttcgagacctggccaacatggtgaaaccccacctctagcaaaaatacaaaaattagctgggcatggtgatgggcacctgtaatcccagctattcaagaggctgaggcggaagaatctcttgaacccgggaggcggaggttgcagtgagtcgagatcacgctattgcactctagcctgggtgacaagagtgaaattccatctcaaggaacaaaaacaaacagaaaaacccctccaatcctgtaatgtgcaacccacctgtccacgtggtgcctcaaacatcccagtgtgcccccgctggacccctgagtgcaccccacactcattcctcttctgtcagggttcagagtctcagcaaatggtagttggcccatgtggtcctcaggcctgagctgctctctaccaaagcaatctacacatatccatcccttccttcccccatgcagtgcagcttgtacctccaggacctgacccaggaggagctcagtaaatatttgatcaagtgactgatagcagcgataacactccacgggacacgttcacaaacaccctcttcccccagccctgttaggtaggtataattactaccactctgcagatgaggaaactgatgcccagagagatgaacagttttgcttgggtgtggggttgcacagccagtgaatatgtgggggagttgagattggaatttaagtgtgactccccatgctgggttctccctggacagctgccacagccaggggagcctccttgccagggcatgaatggaagaagggggccagttggacaaggagtgatgccctggggtgagggccagccagctgtgttcacaggtagattgcatggcagacatctcctgacacccagccccaagaaggcttccttgaaacacacagtgaggttcttggttcttgagatgtcctgggagctgagagccccaggtttggggcctggatctggcaccaactctcagtgtaaccacaagcagtccatcccttcttggggctcagctgacttcactaaagagggaatatgagtaagatgcctaagatgtggaagcagaggtcctaattcctggacaggggcagaagtgggtagtggcctcggcaaacaaatcccctatttgcctcctttaagcaggatccccctaccaggcagtgtgtgatggtgaggcccaagcctggggtctgacgtcgacacccctgtgggcatttggccaaaggcagccatctgccagaatctgagagctgctctcagacctcgctggagagggctacctggggcagtctgagtctctctgggcagactgaggtcctttgctacccaaacggggagaattagagatactgttggctcctgggcactggaagggaggaacgcaggcctctcagcacagggctgggccaacaagttgggggtcccggcacaggggacaacggagaagtgccaacattgggacccaattatgtgatactggggcccagagatagtacaggtgcctcataccacgtggccctgggtggacagcaggaatctattgcgagtggcgggaggccggggctgcctgtcctgcgccctgaagctggccagcggttgtggaaactgggggatattgagggaaccgtaggcccaggtcctcagcctcatagtgtggaacctggcgatcccagggcctgggctggcccccggcgtcacgggaccgggaaggcgctgtggtgctgcggggaattgcggagaagaaggcgggctccagtggaggtggctcatccccgcacggtcactgccctcgcccgctgttggggtccgcggctgggagactgaaggcctcaagtcgggctgggtaggggcacgtgggcagggaaaggggtggtagattaccagtcttcaggggcggggctggagatgcaaccctagggaaggagtctaccaggctgggctcttgaggggcaatggagggctccgggggccaggccaggccaggatcatggagttcaaaggactggagtgaggtttggggtccatgagagtggagctcagaggatgggacggtgggtccaggatttgggacctggggctggaaagtccgaggctagtggagaccaggcctggtatcccagacgaaagggccctataggaaacggggtctcgtgggcgggatctggagccagagaattgtgagaggcggagctaggatggagaaggcgagaggaaaggggtagccgccggcgcggagacctcaatgcggggcgtggtgcggagggggaactggagcgaggggcactggagcgagggggtggggctacgaggaggtggacttgaggggctgggtctggggccggagaatcgtggggagctgcgcctatacacccgggacggtggggttgcgtcggggaagtgggagtcttgggggttcgctgggcagcctggagaacaggcggtcgtggtgcgggcggggccgaaaagaccgaggacagtggggacccggcctgaggaggggtcgggaaggaggggtgggggcgcgcggacgcagatcccgggccgcggcggggcggtggcaggctccagagtggcacgggcccaggtgagcgaggtctccgcccgccgcccctcccgccgccccggtgccagctgccccgctggcccctccctgtacccggcgcttgctccgcgggccgggccgacggcggcgggcggcgtctcgcgcccaggccaggtcggctctggctccatcttgggccgcggcacctggcacctgtggcggccgcaggagcagcgcttcccccgcctgcgcggccccggcgggcgagagggtgagaggctggctccgcgcgctcccgttggggcggggggcgtggtgggcggcacctcccccttgctgagcctcagaacccactccttcccgctgcctgcgctcagacccccggcatcctggcccctgcccagcgcccagagcccccggtggccgcatcgcactccccgcgctccgcctctcattgtcctgtcctgtcccctcttctacgtctcctctgcccatcctcccattttcacaagtctgtccgggaccctgtctccttcggcctccacccctgctgccatcgctcctccctctccccttcttccttttcccctccctcagcctactgcgccgcctaccccgcccccagccttgctgccctttggcttctcctgtcccgcatcattaccccggcccacagccccatttgcctgcagtcgctgcctttgctcctgagaaggtctgtagcctcgtttcgggcccgtattgagcccccttctccctaagtccgggtgggctttgtgcaggaggggcgggaggggagctattctgggcgaggctgcgtggtgcggtgctttcaggcctttggccccgcagcaggggcggcctgtgcttggcgtgcagagtgcagctgggtagacgctgttactgcatacgggcctgtgtgtcccaggctggggcatgagtgcttgtgagcgtgcagatagggacacaccggccgcctaggctgcttctaggccggggcaccctctccacctaggtgccccccagggattgtgggcaaatcctccccaggggaggaagctcaggggctgttgggcgcctaggcctcttcctggtgagcagagcctcatccatggggccactgaccccacagttaccccagaaccctttcctggcacagcttgtgacccggggcatgtagcccttaaggcacgttcattgtgaagggcaggttttgtctcctccaaaccctccctttaggaatgctgcctgctgctttgcccagagttggccctgagtgttcctatcaggccccgttcactctggggtggattaaaccacctcctggagggtgctgtatccccactgtgcaatgggggtttgtgctgtgtgcattcctgcctggtccttgagaggtaaggtccatattttaacatagaaccagttttcctgcctgatcatataggtttgcttttcctgttttggttttgccggacacataagtcatcatccaaatgcttgccacttaactagaggggacttgggccaggcgctgtggctcatgcctgtaatcccagcactttgggaggccgaggcaggtggatcacctaaggtcaggagttcgagaccagcctggccaacatggcgaaaaccccatctctactaaaaatacaaaaattagctgggcgccgaggtgcacgcctgtaatcccagctgccgggagactaagacaagagaatcacgtgaacccaggaggcagaggttgcagtgagccgagactgagccattgtactcgagcctgggagacagagcgagactctgtctcacaaacaaacgaacgaacaaaaccaagaggggacttagatggatgccacagtgttgtctgagatggagcccacttgtggtggtcttggtagtcccctgggcatatcccaaaggcctgggctcctctgctgtggcagcatggcgggagctggactctgtacgttgactcaaaggtctctatgtttgggctagtctggaagtgtctgagaactgggggcttttactcaaaatgacattggttgattgctacataggtggttgatcttccagttgctgacaggtggaacctgaggcagcaggacagcctggcattggccacgggacatcggccacaaccatagcaacttcggcatcaaatggggcaggagagagaacattaaggtatcgttcaaagaatactagaggtcttggatacttctgtatgcctgttctttatcttgtcctaaaagatcttccgagggtccctttagggcaaaaccagaaccttctgtgttgttataaaggcagggtgggtgtgccattctgggcatttaaagtgcagactctagacttgtatgcatgcgtagcctcctaggttaacatttaaaataggctctgggaaacctagtttggtgatagggagactggggacactgatggtgacctggtcctaggatgggatgaaggtagcgaggatgggaagctagaggaggctaacctttggggtgtcttgatggcttctgaaaagggcctctctggcccccagtactaatacttgttataccatgaacttaagctgctcttgatgggaggggaaagagaagattattgttaacaaacactattgcagacagtgcacatgctgtcacatttggtcttcacaacaaccctgcagggtggggatttatttctgttttgcagattgaagaaactgaggctcaaagaagttaggggtccacctgtgagtacatgcacaggaaggggaagagcccccattggaagcagagccctgccccttcctcctcacccctggctccctgggaggcccctcctctggcccagtccacagcactgtgacaggcagtgtggaagcctctttcccccagtactcccctcagagcccttccttccttctgagctgggaaggccaggttgtagttagccaggccaatccattggggttctgaattagccactttcagctgtgtgttctttgacatttctgagctgctccaggcctcagttttgtcacctgccacttgtggagggggaatggggaagggaaccaatagatacatagcccacacgggggtctctgggtgatgactagccctgggtgctgggcagccctctggtgagacaggcacagtgggatgctcattgctcatggcttctcagtgggtcttggtgggggtctgaggacctcattccacctgtctcctcaggggccagaggctgctggcctggctgtttatggcccccctccctgggagggtggtggggtttggccagaggctgtgtggatgtccagatggggcctccctggggtcttggacctgcaactgagtggttgtctccctgccaggggctggcagtgaccacagctgtcccagtcaggaggaacacctcctgccctcctcattcttgcagcctcaggagctgctaagaagcatgttgggcaggtggagatccactcagtgacttgttccatggcatgtcatgagcacgattggcagggccaggccagatcagtaaaaagggtgagagctgcgaggcataggcctgctcagtgctcgaaggggagaggagctcagctgccccacaggtgtgtgcccttgggggtcactgagcctctctgagcttatggaattctcctgtctgtagaatggagataatgactgtctcaagaggttgcttgcacagttatatgagacaatgtatgcaaaggatgtggcacgtgtctggcccttggcgagtgatcaggccctggcagctgttattatcatcgctgttacgggctttattgccctcctttgtttgtatgtccatcttagagctcattgagggcagggtctgggtcagatttctctcttggctactcctcctcttcctgatcctcccagggacaagtctggcttcagccccgtgaagcagctgggatgggacatccttaccaggccggggctgtgttcagagctgcacagtcctgtacggtagccattagcctcatgtggccagttagattcaaataaaacttaaacattcagtgtctcagttgcagtagccccctgctgagtgcttggtacccacatgccattggtgcctacctattggacagcacagggtagaatctttccatcatcgcaggaagttgtgcagagctggagtctcagggactacagcaccagtatcatcctcactgtggctcagcagccaccagccatctcctgagtgctgggctgccaggacatttgtaattacacagaaaccgagtcccacagcccttcccgaatttcctctcgggtagccttgctcacctggtcggggaggttgttgcctggaagtctttatcagcctaggctgggagggcagggctgggattgcccaaatgcagctgctgcctcctgtccccaccctgtttctcccacctctcctgcctggcaaggagtcccagagtgatctccctaattcactgctgtggccagggccgaggtggcccagacactttgaccccactgctcccctcatatgctctggacacatggcctctttcctcctgcccactccgctctccacctgaacaccttcttgcttctctcactccaggcctgacttacgtggctggtcctccaggaagccttttctcatctctcaccctccgtgagctctcctgccttggtggtgccctccctcagaccccatttttggcactcagtgccctcctctgtgggtgtgttcttgtatttgcttgttctcttggtcaggcacacagcagataatcctctgagtgccgacgacacatcaggtcagtgctgggtgttggacagccagaggggagcaggccacaggccaggctttgccaacttcaggcctgtggggaggctgacagttggccaaactgttccatgcaggcccaatgctcagtcagggatgaaggctgcctggctggagggtcgggaaaggggccccaggaagagatgcagaagtggaaagggccagaactggctctaggctgcagctgccaggtccagggtggtctttatggctgggggaagtgacagcgatggtacggagggtgggggacaatgaggatgcaggtacactgggcaagaggggattaaatgtcaggcaggataggtctgattgatggtactgggtgggcatcttatctcactgctgcaccgtccccaggggtacagaaaggtctgaatgaatcccatgttccctagccctacagctgggcacgcagtaggggctcaggagatgctgtggaatcaatgaccagatgctgaatgagtccctcatggaaaaagctgatgcatggggcctctccttgcccctggagctagaggtaggagtcagggaaccccagagacatgccagctcagcaaggctaggccaaggaggatgggggtggttgtggaagcccagggtgattctcagtgtcctctggtcattgctccctcgtcctgtgaactttctctgagctcccactctgtaccaaggagaccctgtccacagtgagttggatactgccagtcccaggaggaagtagcccagtattggcctgtccagctgtgcccgttaagaggccatagtgcttccgtgctggttgaccaagagctgttatcccacagccccaccccctagggctgcagtttcacccccaaagccccagcagatttggctctctcccttcccctcccacacaaaccagccagtaaagagttgagagctgatagagtggcggcctccaggaccccaccctagggcagattctaactgcttgagactgatgatgagataatttgcagtgtcatccttgtgtctaatgtgagatgaccttgatttgaagtgtctggtgtcttgtcactcactgccttgcatatggttctgaccagtcaggcaggctgggactgaaggtggctccctggtgaacctagcactgtgggagttcatagtagaatcggcttaggtgctgccacccaactcaactccactccctccctttctctcttctgcaggcagccatgagctccagccgccccgagccgggtccctgggcacccctgagcccccgccttcagcccctgtcccagagctcttccagcctgctgggtgaaggccgggaacagaggccagagctccgcaagactgccagcagcaccgtgtggcaggcccagctgggcgaggccagcaccagaccccaggccccggaggaagaggggaacccgcctgagagcatgaagccagcacgggcctctggccccaaggcgcgacccagtgctggaggccactggtggagcagcactgtgggcaatgtgtccaccatgggcggcagtgacctgtgtcgcctgcgggcccctagtgctgctgctatgcagaggagccattcagacctggtccgtagcacccagatgcggggacacagtggtgctcggaaggccagtctcagctgctcagcccttggcagcagccctgtccacagggctcagctgcagccaggtggtacttctggccagggtggccaggcccctgcaggcctggaaagggacctggctcctgaggatgagacttctaactcagcctggatgctgggggcgagtcagttgtcagtgccaccactagacctgggggacacaactgcccacagcagcagtgcccaggctgagcccaaagctgctgaacagctggctaccaccacctgccatgctctgcccccagctgctctactctgtggcatgagggaggtgagggctggtggctgctgccatgccctacctgccacagggatcctggcctttcccaaactagtggcgtcagtgagcgagtctgggctgcaggctcagcatggggtgaagatccactgtaggttgtctggggggctccctgggcattcccattgctgtgcccacctttggggtcccgctgggttagtcccagagcctggctctaggaccaaagatgtgtggaccatgacctcagccaatgacttggcccctgcagaggcatccccgctgtcagcccaggatgctggtgtgcaggcggccccagtggcggcctgcaaggctgtggccaccagtccgtccctggaagcgcctgcagccctgcatgtgttcccagaggtaactctggggtccagcctggaggaggtgccgtcccctgtgcgggatgtgcgatgggatgctgagggcatgacatgggaggtgtacggagctgcggtggacctggaggtgctcggtgtggccatccagaagcacctggagatgcagtttgagcagctgcagcgggcgcccgccagcgaggacagcctgtctgtggagggccggagggggccactgcgggctgtcatgcagtccctgcggcgccccagctgctgcggctgctccggcgcggcccccgagtgaggagctgtggcccttggagctggcctgggcccactgacttagtcctagacctgggccagggacggtgggggctccgtgccccctggacccaccggcagctgggcacatctctcacctgaatattggctgcctccagaccacaggactgcagcctggggcttccggccctacacagctgggctgttttcttaagggcttgatttccaagggccacatctctgcaccttccgggctctgaactttgagacagggctttagcactgtgcagaggggagatcctgagttttctgtaaaaaatgaccttttgttcactccaccctcagaactctgccatgttgcctcgtcagactcttggtggctttatttgaaatcagtgctgagaaatagtgaattctcgacatgaaatgtgaggccccagtgacagggactgcccaggtctttagggaaggggactgatgttatcagaggcctcctgtgtgccacatactgtgcttgtcctgtcttcacctcttcatcctggcaagccttcatttggcaaggctgtagccgatgtgccccacgctggacagcttgaagaggtgggactgagatccaaagccagggccagctgagccgtgggtgttgccctgtagcatgtgcccggtccagtcagtgcagtcatgtatgaggagaatttactgagctcatactctgtgctgggttctgtggattctgtggtgaatgagacagaggctgcccctgccctggctgagctcatggtgtgggttggggatggcaggggaggatgctgaccattacggagggctgccaggcttccagggtcattgtgtcagaggctggcctgaggaaggggagaatgggtggccacctgccctaatctcagttacaaagcctaaaattgcactattttcacctcattctgtcggctgaaggatttctccccagctggtgcagtttgtggaaggagggagggcaggaatggagggggacagggcaggagtttgccctggccctggggtaggggctgtgaggctgtgggggctcgcttgcccacatgacctgacctaggctaggcagtgggggccaggggccttggagagacagaaacatgggctttggcacagtctgacttcattgcccaaagatttctcgaggcctgtgaagaatgggagtgggcttgtgttcttgtcctgggtctttgtcttgaagatcctaagatcccgtgacacagccccccaatccacccgtgtgagggaccagagggctagtgtggggtcatggcccacgacctggcctgtttctggagcctcttctgcacctaggagcccaggacccccacagtggtggcttacttttccccatcctcaaggacctggtactcattgaggtggaaatgactcatgcaacagttggtgaatttgtaaagcaggagtggcatttcaacaggccacaaggacaaagtgacaaaggcgtgcgtcaggtcagatgcctcctgaagcccaacgatggaccattctcacccgtaaacatgcctttcccatatgcataggtgcaccccttgggattctggggctgtcagtccctttgtgtatggtgccagggcaggcagctcacgttctggggagtgacacatgggtatatgccatcttcatgcctggctccccatggagtctccaggaaccccagcctgttagggccacatgagagagaacaaatggctgtgggtgcatggggagggacctttcacacagggccatagctaagtagggtcttgaggatgcaggggttagacaggtgggtggagagagggcaggacctgcctggcagatggaacagcctggtcagatacttggatgtgcctgtcctgcctgggccataatgagtttctgcagtggcggctcatttggagcgtttgttgggttgggaggtgaccaggggtccccattgtgaagatcctgatgtaaatgaggaaaggaactttaagggaactgtggaaggggttctgaggtgggaccagatttcagtttagaaatatccatttggcttccagtggagatgtgccaggtgacaccaaggaggggcctgtttaggggcaatggagtgggcagctgggggctgggttcatacacgtgcacacacacgcatacacaggcacacatgtgtgcaatggatttggggaggaggcatttcaggatgctgaggtttccagtttgagcaagaggagggtgaggccactacctgggtcaaggtgaatggcatgttcagcaggtgcagaaagggccacctgccacagggtttggctgggaccagtgaaacctacttcatgaagagactttcttctgtgtcacgtgcagattcttatgcattcacgctggctgggtgccactctgtgctacctccatgctgccctggcttgccaggatggcaggccgggctgggctcagccaagctcccactcacctcatcgtcactgagatgagtatttgcagagcggtgctgaaatccaacacctgtgtcttggctggggccccagatgattctcctggctaaaccacgatccttgtctccctagcccagttgcacagctgctgctgacaggtctacctgaagtgactgcagcctcatttctgattggaactggagacccctcccaaccccctttgctgtgccctctcctggaacagccctgatgcctgcagtggtttagggccccagagcatggccagcggtttagtttacagatctcctccccttggactctagatttctggccagactttctgggtccctttcaggccctgctctgggaggtgttggagttcactgttgatgtgtttgtttggctttgaattcaaaacagatacaaatttggaggtgagagctttgccagaccccagcagggatggggcatcggtcctgactggtcttgtttattttgtcctggtaaattctgttctttggagcataaaccctggagtcctagagccccttgcctcagcaggaatcccccctctgtctgctccaggggctccctgcttctgcccacctgctctccttccatggcattcaggacccccgacagctgaagcctctcttcatatagcttgtcccctctgggcctgcctgtcttgtgtccaggacacaagacacgcatcccttgtctggccccaggctgccatcactgtcacaagaaactcatagagtagagctggtctgaggtcacagtgctggtggtggtggaaaagcagggatggcctgttccactgtgatcttacctcctgtgtcacctggattgggtctctgtccccttagacatgctagatcctaactttacaagggctgaaggggtcttctacacgcaggtcccaacactttgggctggggttggccaccgtagcttagtgggctaaagctggagtttgaatctggatatataggatccacacctatagccatgtgatcttgggcaagttacaagccttgatcatcttcctcatctgtaagatggggatgacaatggtgcctccttcacatgcttggtgtggagattaaatagaataacccaagtagtgcctggcactgagttagtgctcagcacacaggctggtagtgttgggcacccctctcatagccacattcaggggccacctcttaccctgccagcttggctgtgatcacagcccacatcccacttccttaaaagtcccttgttcagagcctctttccaggttcctcgccccacagctttgcaccctgcctgggacttggccctctggctggggcttctgaaaatgtagttcccagagtgcattgaggagggctaccctagccctcaccactcatcttgggctgggttccccagaagcttctgctgagatgaggatgctggagttattagggaggggagagcaagttaagggaggggcagaaggcaaggcagggtgtgatttcagtccaagtcagaccctaaaggggagccctggatgcagtcccacctcagagtaaggactacccaggggtgaagatgtagcctccaggcacttctgctctctggcaggcaggctaggaagctctaggagccccagggtaggtttctgctggagtcgtagggcctattttgggggaagttgtgcacagaaaccaccagagggagtcacaggcatctgggggtgcacccattgacatttgcatccatgtcatgccaagcttgtagcccacaaatgcccaacccttttctccatgcattgctctgtctcagttttgttcacgccaagcagccttggttagttaaatgcagagcttggcatttgcccatgttaaattccttctcctttttcattctggcctggcctggttttgccatctgaagctatgacaagtcctttatcagttttcatccaacttgtcaggcagggcagggctggtatgaagcccaggacatatcactgggacatcccataggtctgtgagattcccaggtccctccaaatccacacggtcatcatgggcaaattagtttaagtctgatctgttaagatccagatctctcacaccaacagcacacacccctttttcccatggccatggaaggagggtagcatagcctgactcgagtcctcgttctcagcagaactggttctgtggtggccacttccctttctcaacttttacctacttctgtttaataggttgttctgcaagtctgagagcaacagcaagcttagaagtgtggactcagcctggtacagtggctcatgcctgtaatcccagcactttgggaggctgaggtgggctgactgcttgagctcaggagttcgaaaccagcttgggcagcatggagaaatcccatctctacaaaaaatacaaaaattagctgggcatggtggtgtgcatctgtagcctcagctactcagggggttgaggtgggaagatggcttgagcccaggaggtggaggttgcagtgagccgagatagtgccactgtgctccagcctggatgacggagccagaccctgtttcaaaaaaagaaaaagacaagaaagaagtatggactctaccttcttgcccttgtggagattgggaactgcctgcccttggcctctttcctgtccatcttgtattatgaaaggctgtttctggcacacccgggctcctctgtgtggtttctgggaagtgactgagggtcaggggaatggagcccctctgcagccggccgctggtaccttccctattgaacccttctttaggtttgctcactctttttgatgggtgtctttccaaagctggctggggacctccctgattgagagacatggggccagttctgttgctgtggctacacgggaataataaagcagaagaacacctgaggaaagctgatgtttactaaaaaaaaaaacaagcgaaaccaaagtgacgtgggcccataggattggggatgggtggtggggtctgactgccttgtcccaagagttgggtgaatgccgcctttgctcacttgtgcggtcactctccaggactcctgcctggcttctcccactccaagcccgagatagcccagcaaggaggaaggtctggccccaaaatacgagctccccaagtggatatcctaaaattcatctttcatggccctactttattgggagggaatgtgaaaattgtgggaatatgtccattgacatctggggctcagggcaggggagtgtgtctagttttaaggtgtgcgcttttagccatgcagtcatcgcccagtctgtcctgcctggagcttttcatttccctgcagctttcctgagaaaagacagagtgtgctttctctgcatcctatgaacatggccccaggactgcagcacctctgtgtgcacacagccaaggacagtcgggggacctctgctggtcctgcacccgctgccctgggtgctctgtcatccccatcccccatttctctttaatctgttcttcttttgtggtttcatgttctctttgttctgggttattcagaacctgtctgcctccccactgtccattgtacttgttcctgcctcctcctgctttgtgccaaggatttacttgccttcgccttctggctccatacagtagtctctcttcttgcggtcttggccattccccccaccaggcccccagctgtggctgtgtctgggtcttggcatttgtgatttacatgggtctaggccctttctctccacctgtccttcccctctttggacacaaaccaaaacatctgagcatctccttacagagggaggtctccctggggttgctgtgccaagtttccattgcttttgcccagaatgagaaatcagttgtcagtggccctgctgggtgaatggaaggactttggtcgggctggaagggcaccccatcagtcctaacttttggtggcccttgttggtggctggctggctaggctgctagagaggtacatcaggtgggtggcacccatctgctggctttaggcaggccatctcctcatccatgttttcagaatcttcttgcatggcttgtaattgggttggggtgtggcctgagcccctgtggggacacactgcactgtcccacctgtatgcttctctgctgtcaggaactggattcgtgtccaagagccaaggctagggactggaggaggagatttctgtctttgacccctccatattagtccattttcatgctgctataaagaactgcctgagactgggtaatttataaaggaaagaggtttaattgactcacagttccacgtggcccggggagcctcaggaaacttacaggaagcctcaggaaacttacaatcatggcagacagcgaaggagaagcaaggcaccttcttcacaaggcagcaggaaggagaatgaatgcagaaggaactaccaaacacttataaaaccatcagatctcgtgagaacttactatcacaagaacagcatgggggaaccgcccccacgattccatcacctccacctgatctctcccttgtcacatggggattatagggattacaattcaagatgagattttgggtggggacacagccaaagcatatcaccctcccaggcctgagcaaggcccaagcagggagcctctgttggggctggaaccctgggaggggtagaattctcccctccactcagatttgttccctgttgctgcccacctggcccctgccctgcagccttctgcctggccttctctctgttcacttctcatttttagcagtcaacagactgggagatggtggccaagggtgtcattttgtacacaagctttgtggcttttgtaagcccagcctgcaactcttgaggaaaactctttggtttgattttttttctcttcagagttgggggtattcagggagaggggcaagggcttcttgtgaagatttcaattcttgaaggtgtggaagcctcctgggctgggggaaggggtggggcaggaaccagcaggggtgtggacacaggggtctggcacctgggataccgtaggacagctgggcaggaagtcggatgctgctttattgaaatttttgatattttatcattttttcattagtttttattttaaaacactgctttaaaataattaaaatatgatttatcttggttaccgaatcacttagtgttgccttaaattttgcgcctagtccctgcctgacctttcctcctcctctcccagggctttaggtactcttagtccctgtgtcatagggactgggagcagataggcccctccgcccaccccacccctcccccacccctcgcccacccctcccccacccctccgcgttcctactctaatctcctaccctgatctgcggtgcagggcggcgctggagagggtggcttgcggctgatcccgcggtctggtttgcggctaggtgtgtgtccccggactggcgtgggtcccgggccaggcgtggtcctgggcggcgcggcccgtgacaggacccgacgcctcctggtgggcatttcgctccaagccgggaccctcggagcctgaggggattcgggagggaggagtcgccgtggggcggggcggggcggggcgggggagggctcccaaggccccgaggacagtcccaccctcaccgacaggaccgtccctgcgcatcccccacccttcttcatcttcgggcgctcgggccaacctggacagcagggcggaagcttccagaaaggacagagatggagaaggtgggaagggtggggctcaggcaggggacaccacggccttaggaatggaagacaggccccacttacctcttcgactccagatgcagctcatcctcacgaggggctggatgaagagggcttcctctctttcccccctaagctgtgcctctgagcctctgtgcaaatatggtggtgcaaacctttggtctgccttcatcattttgttgttgttgttgttgttgagacggagtcttgcaggctggagtgcaagtggcacaatctcgctcactgcaatctcagcctctgggttcaagcgattctcctgcctcagcctcagcctcccgagtagctaggactacaggtgcgcaccaccaggcctggctaatttttgtatttttagtagagatggagtttaaccatgttggccaggcagctcttgaactcctggcctcaagtgatccaccctaataaacttgctttcactttactctgttggctggctcttgaattccttcctgggtgaagccaagaaccgacgtagcctcccaggctgaacctcagtttggggctttaccccatgacacccgcaaagggctgggcttcccttcttcttggggagagggtcaaggaagtggctgtatcttgaacacccattcctctttccttccatgcgcacaaggcctctctgagctgctgtcttccttaggacactttcagctacaagtaagttaattttgaactgaaagttagctaaacaattattatagaatgttcaccttcccactgaagaatttaggaggtaactggcttctgggtgggctgtgtggctcagtgtggacatggattcaggttctttccatatttgtgctgtgccatctttagagcgtagtgaaggctgtccttagccccacgatggctgctgcatttcaactctggaattcagttgctggaattcacactccagtctgtgtgactccagggcggtcattttgtttgtcttttcaaaaatgaaagtaatacgtacttatgataagaatttaaaacagtacagacctcggccttttgttttattcatgataggaatttcaaatactgtgtaaactgaaggtctgatcctcgcccttgtctggaattcccgcagattaccactgaagatgttaataatttccatgggccttccacaaacttccttggtaatcacaagctcagacctctgaatattccatacaagtgagatcccacttagatactattctgtattaattctttaagataggccaggcatggtggctcatgcgtgtaattccagcactttgggaggctgaggtgggaggatcacctgaggtcaagagttccagactagccaggccaacatggtgaaatcctgtcgctactaaagatacaaaaattagctgggcgtggtggcgggtgcctgtaatcccagctacagtcaggagaatcgcttgaacccaggaggtggtggttgcaatgagctgagattgtgccgctgcactccagcctgggcaacagagcgagactctgccaaaaaaagaaaaaaaaaattaagatatgtcttgtagataatactgccacatataacaatattttctttattttcttcctgggcatattgtatggcatagtatacaagtgccttttaaaattaaaccagacttctttttctggactttatgttacacctcacattttttttaacttaatagatttatttcttagatgagatttaattaagagaaaaagtatgcagaaaatacagagttcccctacactttctcactctcatacactttctcctattatgagcttgcatagtgtacaacatggtacatttgttacaattaatgcaccaatattgatgcattactgtttcctaaagttcatggtttaaagtttactctttgtgttggacacttctctggattttgaaaatccatgtggtgtatctcccactccagtagcatacagaatagttggaccacctaaaaatcccctgtgctccgtccattcacccctcttaccttccccaggactcctggcaaccactgatctttttactgtctctatagttttcctgaatgtcacagagttggcttcatgtagcatgtagccttttcagacaggcttctttcacctagcaatatggatttaagcttcctccatgtattttcatagcttgagaactcatttctttttagtgctgaaaaatgttctgttgtctgggcatactgccatttattcatctaccaaagggcatcttggttgctttcaggttttgactattatgaataaaactactataaatattcatgtgcaggttttgatgtggacatatgtttacttcagttggttaaatacgcagggcaacattgctgtaagactatgtttagcttcataagaaactgccaaactatctctgtacaatttcgtattcctactagcaatgaatgagagttcctttttctcatataaaaataaatatccttgtatgtatagttttatgttcaggtgtgagtatatctgtaggataaatttttcatcaagtggtacatgtaaaatatctaccggtattggcaaattgctccccagaaagattgcaccaataatacatgaaaacgcatattttctcatacccacgccaatatttgattgttaatcgaactttaatattttggctaatttgataagtgaaggaacaatgtcttcctagttattgtgatttgcaatctgttccctgtgagtgaggttgtggtctgccggactgcgtgagtgagaattcctgttctggcactctcaagctgtgtgatgctgggaaagttgctgaacctccctggacctcagtttcttcatctatagaatgaggatggtaatgggtctttaccttattaattggattggaggatttaatggcatcattcatgtaaagtgccagcacagttcctggctcaaaataagggccaagtaaatgtaagctattattattctccaatatgttcataagcacttgaatttcttcatttctgatctgcctatgttcatatcaatttcccaggattttttcttattgattggttagagctctttgtatattaataacatacgtttatttttttcatataagttacaagtatttttttattccagtgtttcatttgtctcctgtttatcagatcctggctccaaaccagtgcaacatccttctcagggacacagcattttaaatcttacaaagcccctcatttcccatctgtcatttatgtctcaggacatccacatgaggcaagctgatgtatttttcagtaaagaaggagactttattgaccaggcagggcgagtgacttgcctaagggcacagaaggaattagtggtttgtacagactgaaatggagggtcctggcccctaggtaccacctcctccactcttaaagaaggggagagggaatctggaggtgcaggaaggaaaaggtcaaggtcatcatgacagacagcctcaccccatcccctctcagaacccaagagcctgggtccttttttttctgttaagttctgaccattctctcctgataaatcaagggaagaatgcgagtaaagggtatgtgttactcgggcgagactccctgcttggaaggtctaggaggggaggtatgtgtgtgagtgtgtgtgtgtgtgtgtgtgtgtgtgtgtgcattctttctgtcaagttgcccagcaggtgagctgaaagctggctctcttaacttggggatgagcaatagagtcaggtctcggttcgtcattttccaatttcatcagctttgaaaatattttaataataaaatccaagcatttgattttcctgactagttgtttattctgatttattggctatgcatggtgcctgaagctcctccaaactcccaagggtatccctgcatgtctcaggatgtctcttaacccagtgccatgtgagggacagaacctagaccaggcattcagagccaggtaccattgtgcctaccctactcactgctagatgatgctagtgaggtgctcacacctctctgggcttagtccctccattgtaaggcaaatgggaggcctgctgcctctgccttgctgggttgttggtatggctgaaatgaggggatgaaggtgatgtggaaaacttgataggagagtggctgccgtgtgtccattctggtctcctttgtctcatgtcaagcccagggactggttctttttctctcttcgggtctgtgacttctgggaatcctgcttgcctcggtgccccctggtgaggtggtgccatataggttgctttagcacatcaccgagagggactctccaaaccctatgctaagtgttcaccgccagaacacttgcatttgggccagaccgggctagggtacctaaccatagcttcctgggttcatttcacagggtggacagcaactgagagatgtccagggaaatttccctttttaagagataggggttctggggcccataagggcaggaagtatccccaaccacaggcaagttcatgaagcccatagggagtaggatggagccagttgccaggagcagggaaaggttcatgtctttgctcctccatgtacccagggactcagcaccacctgcaagttgatggaaaggcagaatctcagcacactctgagcccccgaatcagagtctgcattttaacagaacccctaggtgaggcagaagcccactactccagtatcattcattcattcactcacctagcaaacatgcctgaggccgactctgtgccgtgccctgtgctgacgaagaccggccaaaagaccttgttctggtcttcctgaagctcaggtggagcagacaccccaacggccaacaaatgtgaagattgagaactgtgatgggagcctgaggtgggagcagctaagcttccctggggaattgggggtcagggaagtagtcccaagaggctgagtacctcctgtgtggcaggggcagggtggcctttgctccctagtatcttttttttttttgagatggagtctcactctgttgcccaggctggagtgtagtggcgctaccttggctcactgcaacctccgcctcccaggttcaagtgattattctgcctcagcctcccaagtagctgagattacaggtgcccgccaccatgcgtggctaatttttgtatttttgctagagacggagtttcgccacattggccaggctggtcttgaactcctaacctcaggtgatccacccaccttgtcctcccaaagtgttgggattacaggcttgagtgactgcgcccggcctgtgctccagtatcaaaacctgcaagcacctacagagtggagggtgctatggtcagggtggtgctcaggtccagactgatggaggaacctgagcaggggcggggaggcatttcaggaagagggagcagttgctcctgcacaattttgttgcatcgggccaagcaggaaggctggagaggtgaggaagagccccgggggaaagcatggaccatcagggaaaagtcagacattgccctgttgctaaaggcactcctggatgggttttagcccggggagacctgaatcaaattagggtgcatagaaagaccatgatatccccttgatggggaggagaaagaggagaaacaggaggactaggagggaaagccgaggcgatttgactcagcatgagtgagatgtggggcagggagagagagagagagaaagacacaaagagagagacaaggagagacaaaggggagagagagaggagagagagagagagaacagagagacagaggagagaaagagacagaggagagagagaggggaacagaagaaagagaggcagagagacagtgaagagagagaaagagagagagattgagaaagaaactttgcatccgcaggcctgggccccatgcagcactgacagtggtaggcagccgacgtgaagcaggaggcacaggcagggaggatggacacagcacctcccacagcttctgagtccttggtgcagaatgtttatggcacttttcttcgttctttcttaagacttatttagtactcatcttttctcctttactccattgtgagcttcccaatgataggggcactgtctctctcatgtctgtcttcccacattgcttatatctaggatgggaaatgcaaggctcccaggcaatgcttagttaaaggggcaaagggctgtggtcttgtcttaagtctctgccaggctgaatgcctagaacttggccctcaggagggcctgagtcactgtgggacacagacttttaaaaggtgaaacagccaccagccaggggtgaggaactaacagcagacacattgcctgattttaagatgtactataaagctacagtaatcaactaagtgtggtattggtaaagaatagacatagatcaatggaacagaatagaaaattcggaagcagatccacacatgcacagccaattgattttcaacaaagatgcaaaagcaattcaatgaagataatcttgctaacaaatggtgctagaaaaatagaatacccatatgcaaacaacttatttatttatttatttatttatttatttattttgaggcatgtcttgttctgttgcccagactggagtgcagtggcgcaatctctgctcactgcaacctccgcctcccaggttcaagcaattctcctgcctcagcctcccaagtagctgggattataggcgtgcaccaccacgcctggctaatttttgtacttttagtagagacaggattacaccatgttggccaggctggtctcaaactcttgacctcaagtgatccgcccaccttggcctcccaaagcgctgagattacaggcatgagctaccacgcccagcctatttatttgttttctttgtataaatttagggggtccaagtgcacttttggtacatggatgtattgcatagtgtgaagtcttggcttttagggtggccatgacccgaacagagtgcactgaaccctgtaagtaacttctcatccctcgccctgctcccaccctgctgcccttctgagtctccactgtctattatgccatgccgtatgtccatgtacacacattatttagctctcacttgtaagtgaggacaagcagtatttgactttctgcttctgagttattgccttaaggtaatggcctccagttccatccatgttggtgcaaaagccattatttcattctttcttatggctgaatagtattccacggtgtatgtgtacacacacacacacacatctataaaatatattttctttacttaatcatctgtcatatacaaaaaagatttatcttgattcatacttcgcagcatatataaaaatgaacccaaaatggatcacaggcctaaatgtaaaattgaaaactaacagatacaaacaaagaagaaaatgtgtgaccagggttgggcaaatatctcttagatgtgacacaaaagcatggcctacaagagaaaagtgaataaactggctatctttttttttttaattattattatactttaagttctagggtacatgagcacaatgtgcaggttagttacatatgtatacatgtgccatgttgatgtgctgcacccattaactcgtcatttacattagatatatctcctaatgctatccctcccctacctcatcccacaacaggccctggtgtgtgacgtcccccttcctgtgtccaagtgttctcattgttcagttcccacctacgagtgagaacatgcgatgtttggttttttgtccttgcgattgtttgctgagaatgatggtttccagcttcatccatgtccctacaaaggacatgaactcatcattttttatggctgcatagcattccatggtgtatatgtgccacattttcttaatccagtctatcattgttggacatttgggttggttccaagtctttgctattgtgagtagtgccgcagtaaacatacgtgtgcatgtgtctttatagcagcatgatttctaattctttgggtatatagccagtaatgggatggctgggtcaaatggtaattctagttctagatccctgaggaatcgccacactgtcttccacaatggttgaaccagtttacagtcccaccaacagtgtaaaagtgttcctatttctccacaacctctccagcacctgttgtttcctgactttttaatgatcgccattctaactggtgtggtggttttgatttgcatttctctgatggccagtgatgatgagcattttttcatgtgtctgttggctgcataaatgtctttttttgagaagtgtctgttcatatcctttgcccactttttgatggggttgtttttttcttgtaaatttgtttgagttctttatagattctggatattagccctttgtcagatgagtagattgcaaaaattttctcccattctgtaggtttaaactggctgtctttaaaattagaaacttctaagctgggcacagtggcttacgcctgtaattccagcacttggggaggccaaggcaggaggattgcttgagcccaggagtttgagaccagcctaggcaacatagagagaccctatccttataaaaataaaaaataaaaaaattaaccttgtgtggtggcatgtgcttgcagtcctagcaacgtaggtggctgaggcaggaggctgaggtgggaggatcacttgagtccaagaggtcaaggctgcagtgagccatgattgtgccactgtactccagcctgggcaactgaccaagaccctgtctgaaaaacaaaatccaaaacttctactatttgaaagacacagttaaggaaatgaaaagacaaaccatagagtggaagaaaatattttcaaaacacatatctgataaataacttgtattaaggatatatgaagatctctcaaaacttaacaataagaaaacaagcaacccaatttaaaaatgggaaaatatttgaacagatgcttcatcaaaggaggtatatgactggccaatagttatgtgaaaaaatgcccaacatgcttagttatcagggaaatgcaaattaaaaccataagatcagaccaatgcatacaaaatggagtggcttaaaaaaaccctaacagtaccaactgccttgagggttctcagtaccaactaagaactcttgtacactgctggtaggaatacaagatgggatcaccactttgtcaaactctgtggaagcttcttataaagtcaaacaaatatttaccacatgacttaccaaacatactgctaggtacttacccaagagaagtgaaaaattatgtttgcacacaagcctatccaccaatgtttacagtagctttatttattatcaccgaaacctgtaaacaaccccaaagcccttgaacaaactctggtatatttatgtaatagaatgcttatcaataaaaaacaatgaactaattatatatatatatatatatatatatatatatatatatatatatatgatggataaatctcaaatgcattctgctacgtgaaagaagccagactcaacagctgcgtatctgaattattccatctgtgtgaattctggaaaagggaaaactattgggataggaaataaaggagagcttgccaagggctggagagtaagggaaaggctgactacaaagaggctcagatggatttggggagtgaaagtgtcctatatttttactgtgatggtaacatggttgcgtttgtcaaaactcatagaattgtacactaaaaagagtaaattttatcatacacttatatcttaatatacttttcagaaagcaaagtatgtaattatacagatcaacaggaagaacaaataaaaccatacaatactcacacctgcaacataactagaagacacagaacactataatcttccaattacccaagagaataaaaataagcaaccattaccagtggagctctttctgaagtttctgccccaaaccttgtcaccgagtaaggcagagcctggataaaactgcatgggaggtgcatggatcacctgaggtcaggagttggagactagcctcgacaacatggagaaaccccgtctctgctaaaaatacaaaaaatagtcaggcgtcgtagcgcccgcctataatcccagctactagggtggctgaggcaggaggattgcttgaaccccaggggctgaggtttcagtgagctgagatggcgtcactgcactccagtctgggcgacagagcgagactctgtttcaaaaaacaaaacaaaacaaaacaaaaaaacaacaacaaagagaaaaactgcataggagagagaacaggggaatagagtgctcaagactgagctaaaaccatccccagaaagactggaaacagcctagttgtccttcaatagctggatagttaaaggttagaccagcatggtacatccatgccccaaaatgctgctcagtagtcaaaaggaaggaactgttgtctcagaatgcggatggatctccaggtcattctgctgagtgaaaacagacaatctcagaaagctatctttgtgtgattccattgatgtaacactcttgaaacaaaattttagaaatggagagcacattagtggttgccaggggttaagcagatgtggctgtaaaagcgctgcgggagggatcccgcggtgacggagcactctgtatcctgactgtatccatgtcaacaccctggttgtgatgtggtcatacagtgttgcaagatgttacactggggaaaactgggtacagggtacagtgggcctctctgtatcattgcttacaactgcttgtgaatcatgactctacagttaaaaagctcggtgaaaaaaaaaaccctcatttacaatcgcatcaaaaaatgtgaaatacttggagataaatctgacaaatatgtgtaggacttgtagactgaaaactacaaaacattggtgagaatgaaaggcttaaatcacagtacgctaacaatagatggatttgatgaatgtaagtgaagggaaatagtgttgatcacagacctgaaatttttctttttcctttttttgagacagtcttgttctgtcacccagtgtgtagtgcaatggtgtgatcacagctcactgcaacctctgctccccgggttcaacaaattttcctgcctcagcctcctgagtagctgggattacaggcgcccaccaccacgcccagataatttttgtatttttagtagagacgggagtatcaccatgttggccaggctggtctggagctcctgacttcaaatgattcgcccacctcggtctcccaaagtgctgggattataggcatgagccaccatgtccggcctgaaatttttcaaaataaaatgctggtaagagggaaaaaacaaaaaaagcataggaagaagattttaggaatgcatagttagttctgctataacacaatatatgtgttcctaaaaaaccagtgctctatgcaaaaatcacataataaaaaccactgggcttatgggaaaagtggggttaaccgcacaacactccaaaattttgtcagtagcccataagaaacaaaaagataggaacttaataaaaatagtcattgagttttgcacgtttgatggttaagaaaagcatgtatattgcaataaatatgacacttgatcttgaaaaagccctggagtttgtgtgtggacgtgtgtgttaccagacatggagctgtaacaccagatgtggatggatgcagctcataacacacgaggtggatgcggagctgtgggcatttgaggcatccatctgggtgtattttggctcggttcagttgggtacaactttctgtgctcacctagagtttcttgtagaccacattgcacataagcaagtgtgaaattcacatcatgctcaaattgttccctaatactgtaactcaatctcatgggaacaaatttctgttttcaaaacaagtattaacagaatggactgtgcttgttaaagtcacaggtggcaatcatcaacaacttgttagacagtttgctctttaaatgcatagatttctaaatctaaaaattaggaaaaaaaaaaaaatgaaacctcatgcccaggtgtgaccatttcttgattgcatcctcacaggattttgggttgaaagaaaacaaagtccctgattctgccacagcccacccaagcatgtcctcagaggtggcattgaattgtcccattgcactgtcccctgttgtctgagactgcactgtgggccaaacacccatggcaggccccacggaggggactctgataccatgtcatctccactcagtcatctaattagatgttggtcaggtacccactggaggccggacagcacataaaggtggggagggggtttgtggggggcttctgatggagacgagtagaccaggtgagtactaaatgactcaatctagatgagaggaagaaagggtcataggtattcattcggaacccagaaggcctcagacaagtgctgtgcacctcgccctggacaacccagcagggtcaccctgcagctgcagggcaggctctgagcttgggcgggcacagactctgagcctgggcagcctgagggtacagagggtgccagaattaggcccctttcgttgcctttgggagatcaatgcctgcaagggccccgatgcagccaggtggaaggggctcagcgtggggacagtctctcccatgtgctggctggcctggggacagctttgcctctgcggattagtgtgagaggtcaggacccccatgaagccatgccccccccccaccaggacatgagaaggtaccagctcctggagttttgtgtcccaggcctggtcgggacacttgggctgccagggggcctggtcctgggccactctcaggccaactccaggctgaggaccgggagctggaggaaagggctggtggtctctgaaccactagcttccctgtggttcctgccctggtggctgaggttagtgcgactcccctcaatccagcccggtccagaacgttctgagttggggatgggagcttcttcccaccagagaaagcattgcaaacctttttgtggtgaaaacatccaaatggacagaaaactagagagggtggatccatgaccctatcgcccatcacccagtgggcccagttcttgactctgttttgccaagaagggggatcaagtccccagcttttgaagatatgccagactgggtttgaaaacttccgcttctctcagacagagcactttccaacccttggccctagtgggtccatctatgatgcggagacaggaatcccaaactcagagggggctgcgaagatctaatgaaggaacctttgtgaggggctccctggagaggcagacacactgagggtgaggaattcaggttggacctgtctccggccacagccagtccagggcttagcccatccttgctgtgtgccgcagccccttgctctcagctttgactctcacaagcctcaggtcctctgtaggcactatagagaggcgatagtcaggccccactccatcctcctcctccctgctgcccaccgaggttccttcaccatctggacatagccctgagcccgggctcagctccagtcccaaggcttgggcttgcagggcatcagctccagcgacctgccttctccccccatcgagggctgtgtgacgtgtgtgtgcatgtgtatgatgtatgtggttgtgtgtgtgtggtatgtgtgatgtgtgtggtcggcagtcagctgggtaggcctagacctgcccagtgaccccagggacaaaggagcagtcctttcggatcctcccagcgcagggatcctctgatggacaaggagacgctgcagtcagaggcactgtgttttcaggacagactgaggcaaagcattttggcaaatggccttggagccctgaacaccctgagaccttgtcaccgccaagcccccggaccaggtatacacagcaattctaaatttgctaatagcctcattaaaaagcaaaaggaaacaggtgaaattaattttcataatatattttacttaacccaatatatctaaaatgttaccatttcaaagtttaatttgtatatgactgagatattttgcatttctcttcatgctccgtcttcgaggtctggcatgcacccggcactcacagcacgtctcagtgggaccagcccggcttccaaggctcagcagccactggagacagcacaggtctagtgcagttgctctcaactctgctgtgcattacaatcacctgagagctttgaaaaagtgccagtttccgggctgcctgggaaccccctcatagttacatgggaatctcagggaggggtggggcagacaggggtcactgatcctggggtgggaggtgtcacagccccacggaagggcttcccatcagagggaacagcgtgtgcaaaggcaggggagtggggaagagcaatgtttagggggaactgtgagtggtggtgtgtgtgtgcagttgtgtgtgtgattgtgatgtgtgtgcacatgtgtgtgttgtatgtggtatgtattatgtgtgtggtgtatatggttgtatgtgtgtggtgtggatgtgtttggtatgtgtgatgtgtgcagttgtgatgctgtgtgttcatgtggtgtgtgtgtgtgtggtattctgtggtgtgtgtggtgtgtgtagtgtgtggtgtgtgtagtgtgtgtgtgtggtgcagtgtgtgtggtgcattgtgtgatgtgcatgtgtggtgtgtgaggggggtatattctgtggtgtgtgtgtggtgtatatggtgtgtgtggcgtgtgtagtgtgtgtgtggtccagtgtgtggtgcagtgtttggcatgtgtgtggtgtgtgtgtggtgtattctgtggtgtgtgatgtgtgtggtgaaatgggtggtgtgtgtgtgtggtgtgtggcgtctgtgtgtgatgtgtgttctgtgtgtgtgtttgagtggagagatccttcaacctgaaggatcctgagcctttctcttcaggacaggtgaggacaccttagctggtggctgtgtttcctgcgctggggagtcagccgagcggagccccaccatggctaggtgttacatatgttcagtatcacctctgacttcaaaaaagcgagcacccccatttccaggaatcgcctgggaaccgtttcaaaggagtcgtgccagccaggacagagagctgggaagcgggaccacaggagcaactctgaacagtcattggatgcgctctccaaccagctgctctgctcacctcaaagcacacaccaaagagagggagaggctctgagcccatgcgggtgaatcagggtgagccacgcaaatctgctggcccctggcagtcatggcagatgctgccaggaggcctccctcattactcggagtaggcttgaagtcatgctttccagtgtgaggtgcgcgagccaagcaaaggaggaggcctggtcaggaggggggagttccctgtgacaatggaatgaaaaggctgctgcagggcccagctggccctgggcacggtgtggggaggggaatccgcaaaccaggcagagccctccagcccagggcgttagttgttgacccatctttcctccccaccaccagactgggagtcctcatcctttgcgctttgcagtttaggaagcaatctctgaagagcacaaacctatttaacaatgataaaacttcggctttaaagggctgatgtggcacactggcactagagccaggacacatgagggagatctctcttctcctgctcagcagctggcctcccttctgagggcccacctcggactgactggaggacaccacttggaatggcaaagatgggggcaatgcaaaggccacaaggatggcttcatagacaggatgtggacttggcattgggcagacctggatttaaattccagctctgcctcagtctgttttccattaaatgaagatacttgtgcaagggttctgtgagaattccagtggctgaagtgtgaagcattccccactcagggttgcacagctgggactgggtgaacactgttagtaccctcaccctgtgtgctgcagctgcatcagggccagctgcccttctcacaagcacctatgcacagatagcccccatttcaccccaaaggacaactattcagagaattaccatccatcaagccagggcactccaatcagaggaaggtgtcacttcctggtaggacaactagaagggcaggagctattcactgagcataagaggaaggcatggtacaggtggggcatttgtggagagcaagacagggagcagagaagtttctggcaacatgctgctcccagaggaatagggctgccacacctggtaccaggaaactggggaatggccacagctcagctctgccactcaagaaccccacttgccacctgcataggaaaagacaacattgtggccacagaagggtgaggggccccacagaactggggatgccaggacacttggtccatgggaagctgccttttgctctggcctgtgcctggaagcaaaaccatcatccataactccatctaaggattcttagagcagatactagctggaccacaaggggcagcccaaacctttctgttccatcccatggcctggcccttgctggcccacagctcacagaatctgctggggctccccagctcaggcagtacaatactctgttgaccatacgctgacaggtcaggcactgctcttcctagttggacctgatactagtcatgattcactcacctatgcagaagcctgtgcatgcaacaaggcttagcccttctcccatggagatgaaccttttgttcctccctcctgctttcaccacccccaccctacccaaagaagaggaagaaaacagagtagctttggcaaccttttctacccctctcccaggcaagaaaagcagaagaacaacctgaagaaccaggcttctctcctatatcctccatctcgccttcagcctgcatcccttcttactaccctctctccattataatttgctctctgtacattttaaatcaatcaaattagcaaaataaatcatgaaaaccctatacatttataaacatagtaatatgtgatgctcataagatgcaaggagatgggtactttcatagtgttgatagtaggaatataaactgaaaatgctttttttggtaaggcaatttagccatttatatcaaaacattaaaaatgttcatccctcagacccaggcattcagtctcagcaatgtatcctagagaaatctaaaatacaaaagtcacaaagctcaatgcaagaaaatgttatcatcttgctaattacaaaagtggaaaattgaaaacaatttcaatttacaatatatggaactggttaagtaaatatagcaatgggatacaacattggacaggctctaaaacagtgtttaaccagaattattaaacattcattttgtagtatgaagtgactatagcaatgtaatacaacattgggtagactctaacatggtgtttattcagaatttgttttgttttgttttgagacagggtctcactctgttgcccaggctagagtgccatggcatgatcatggctcactgcagccttgacttccccaggctcaggcaatcctcctgcctcagtcttctgagtagctgggactgcaggcatgcaccaccaatcctgtctgttttttttttttttttttttctatttatttgtagagatgggatttcaccatgtttctcaggctggtcttgaactcctgagttcaagtgacccgcctgctttggcctcccaaagtgctgacattactggcatgagccactgtgcctggcctattcaaaattctaaatgtttactttgtagtgtaaaatacatgtggtaaatttattttaatatggatcctataaaatttcatatacagtatcaatctcaaagacatttaaaggtttttgtttcaaataataggaaattgaatgaaaaggaataaagcaaaatgttgactggttgtcatcaagtaataactgtgtattatttattttcattcatatattcctaaattttctaaaaggtttatactgttttgaattttttttaatctttaaggaaatcaacttttatagcttagagtgggtaaattttaattaatatgttccttttgtcaggaatatttgcaatctaaacacactttaaactttggcttttctcttgtaccaccctgttgccatttaccaaactatagtattcacagcctatatgtttattattgcttcagtcctcattgattgtatcctatggactatgcacctatttaatcctcatacagagtatactctgtaaagtatgctgtctgacactgaaagtcagaaagtttgagttgcttgctcaggacaccaaaggtcatcagcagaggctgcttgatactgtcagtacttttcagatagtcactctatcagggctttagtccacagtgctcctgtggatgctaaccctacctgggattgctctccttttccttgagccctcctgtcttaggctgttttgtgttgctataacagaataccataccctgggtaatttataaagagaagaaatttatttggctcacaattatggaggctgtgaagtccaagagcatggcaccagcatctctgctttcatgttgcatcatcccatgatagaaggtggaagggcaagcaagcacatgaaacagagaagggagggggccgaacttgatccttttatcagaaacccactcctacaataacagcattaatccattcatgcaggcagagccctcatgagctaatcacccctcaaagcaccctcctcttaatatcatcgcaatggcaattaaattacaacatgagttttggaggcaatgctcaagccatagcacttctcaagaagggcaccagcagaatatgcttgtgatcgctctgaatctccatcaggtcatagcatggaatgaaggtatctggtttactcaagcatccctcccacggcctgaggtcccaagattggattttctgttcccatcattggaaagcagaggaatccttgtggaagtgcatctgccttcacaggaccacaccaggagcaggaattgtaaaatccacctctgctctcccaagagagaaggagagggagggaaggagcacatttggcaactgagagcatgcaacagaaaccattccttggagatcctatggggcaagcaatggaagggacactaatttccatctggaaaagatatggccagagctctgacttcaaactctggaaggaaggtgggggctgacccctattgaggatcttctgggcaccagatgctggactgggtatttaattctagtcaatttattgagggaatgagactccaaaaggtgaaataccttacccacagtcatgcagctggtaggtgacagagatggagctgaacccagactcttcctcttatccagtcacataccgagaccctgcattgccgttggaagctatttgcctttcttctcagcactctgggtgtcgtttgcgtgctctctctctctctttctctcagtaacttcagactagagaatggggtaccaaggtcactgataaggaagcccagggcctgggggtaaattttagtgagtcggcagtcctcaatactcagacagatcatcttcttcatgatgatgaagcaccatcaggagcttaccatttggagagataggatggcttaaccctgaatctgtgcctgactggggtctcataccctggggattttatagtgtaagctcaggaaagggattctgatgcctgagcagagagaatgccctaattaagaatgacggccagtttggacaatctccctgaatcccaccgacaaaagaaacaatggcttcccaatgacatgggtctcaagatggacttgggcagagcaggaacatgcaggggggttggtggtcttccaggaggcagggataaagcccccagcaggaggaagggccccccaaggctctccttcctatctctatctctggtcagtatgagactgagtcattcacttagctaaggaccagacaattaaagcacaggaacagatccaagcagatgtataaatctattatatggtgaagtcatactataggtcagtgaggaaaggatgagttccttaaaaaatatattgacacatctggttatccatttttaaagaaaataaagttaaattcctatcacataccatgtacaaaatttccagatagattgaatagctaaatgtaaataaataaataaatacacacacacacacacacacacacacacacacacacacatatatattatattataagaaaatgttgtgtaaccttacaatgaggatttctacttaaataaaataggaaacctaggcgaggtgtaatggctcatgcttgttatcccagcatcacttgagctcacaagtttgagaccagtctaggcaacgtggcaaaactccatctcaaaaaaaaaaattagccaggcatggtggtgtgtgcctgtagtatcagctattcgggagactgaagtgggaggatggcttgagcccaggaagtggcggttgcagtgagccaagatcccaccactgcattccagcctgggcaatagagccagaccttgtctcgaaaaacaaacaaacaaaacaaaacaaaacaaaacaaaaaacaggaactctagagcccataaagagaaaaactaacttgataaatttggttacataaactttttaaactcctgattttgtaagccattaaacagttttttactagactagaagaaaataattgcaatacttaaaatagacaaaaggtttatatccctgatatgaaaagtttatgaaattaataataaaaagacgactataaaacagataaaggacacaaagggcaattaacagaagagattatacaaatgaacaatagcatgttacaagacaacagtgttgggataatgcaaattaaaattcatcagtttagcaaatgtttaaaatgttggtaccagtagtctaattttgatgacactataaattgctacaatgattttgagaattaacctgacagttactgctgacattttaatctggatgcccttggatgccacttctggaaaaggccagggatcataatcaaaacattaagttactcttacatcacaagcatgccctgatcagaacagacactgaccacaataaccaacaagactgtagcatacttaaaaatagatgtatacgagtatgctccttgtacaattgtttatgttagcaaacaaacaagcaaacctggaaacaatccaaagtttcatctatagggagaagaataactaaattatgaaggatcatcaatctggaaccactgcagctctttaaaaaagaaaaagaaggtaaaactactattattgccctggcaggatatccactatagctgtaaaaaaaaaaaaaaaaaaaaaaaagtttagaaaataaaaataaacaaaggaagtaattcaattgtagctcttcaaactgagatggtaataacagcaattacttaagtacagtgtaattatgtcttcctgggggttggttacatcttggcaaagtttatcacagcaagaattggttttggcttctggggttggagccttagattggagatagaaaaaaaacctcaaaggaagcattcctgtccagaaggtaaagtgattcccacccccctcttccctgctacaaaaggtcatggctttggggggcactgaggtctggcatcaacccttaagtttatttttcccataaggaaaagcacaggagtctcatgctagcactttagagaaccaagcatgtggatctacagttccagggaagtccctgactcggggacacccttctcctgaaatccccacactcagtcagggccctgtcatgtgttcccatggcccccagttctcttcttggtggcacataccacacgggtcatttatgttaggatatgtacctctttttccctccatgagactctcagggggtcaccatcatccccagcacctagacagtgcccagagctttgcatatacagggtaaatatttaccacgaataaatgaaattagtaaggggctacaagaacccaagatgattgaagagatataccaagaaatgatcaaatgacagccagagtgtcagtcactcagctggttccaaatgcctaataaaaattaactccctctgtccttaccacagccctatgaggtggccacacttattgtgctcactttatgatggggaaacaggagcatagaagttgggcaactttccaaagtcacaccgtgagcgattccacaacaaggggttgaacccaggctgtctgggtccagaggtcttgttcttaaccacagtgggctgctgcctcttctccctaagctagtgcatcctggaggtcctcagaatgacttgaactggccagagggtaaacgtctgctgaaggaatgaatgggcaatgaatttctaggaacctggggccctggggtctgggaaggccgttgcctccccaagggaatgacacagggccagtctgctctccttctgtgtgggcccctggacactggtctggcattgtccagacaccaaagcacatccgcatagcatgcatcaaacaaatggtgacctgctaatgaggaaatggctaaaacaggaagccatgaccagagtacatgcttcatgcctccagccccgcattgggtaatggaagggcaattacttctccacctcttcacctatacagggcagacttgcctagaagttcagagtccttcctgccaatttggcatcctttcttccagagtgttcccaggctaggtggggatgggaaaagccacaaggagcacagcaggatgatagagatgtggccaatgggcaatgctggcactgccaccctggccagaagagctcactgtgggacactttctcattgtttactagggaagaggaggttggtttggaattcattttgatttgttgttgtaaattctctttgctgtcccaatttaaacaaaaaagaaaatggagaaggggagtttttaatcaaatggattttcacttgggttttatcatgaacctggaactgctttgaaagctgaagccagctgggcttctgggtcgggtggggacttggagagcttttctgtctagctggaggattgtaaatgcaccaatcagtgctctgtgtctagctagaggattgtaaatgcatcaatcagcattctgtaaaaatggaccaattggcactctgtaaaatggaccaatcagcagcactctgtaaaacggaccaatcagcaggacatgggcggggccaaacaagggaataaaagctggccacctgctccagcagtggcaaccagtccctttctgcactgtgggtgttttgttcttttgctcttcataatgaatcttgctgctgctcagtgtttgggtccgcgccacgtttaagagctgtaacactcaaggggagggtctgcatcttcactcctgaagtcagggagaccatgaacgcacctgaaggagcaaattccagacgcccacctttaagagctgtaacactcactgtgaggtccacagcttcattcttgaagtcaccaagaccgagaacccaccagaaggaataaattcctgacacagcttgattttgtctttggtgagaattaagaagggtcacatccactgatgaccagttgggggatagatttacactggctatgcccagtggtactcaaagagccacaattactctcactgtggagcttccttcagtgacaccagagaccaggaagggagctacctaggagacctcagcctgtggaaatcaaactgtggtgtgagccctcctgttagcgagcagtggtgctggctgccttctcacactgccacttggcaaccagaatacagggacttcaccgtgagtttgagctaaaacttgcctgctagtgaatcttagcataggtaattttgggttaggagaattttggtttctctgatgacttggttgacatctttgagattcagcaagccccaattcagattagacttaaaacttatcagtgcaagtcagacagcagtgattactctgcttgttgagacctagggacatccgtttgaattcagtccgcaccccatggacgagcccagctcaatgccaggaagtttatgaattcctggggccttctagtctcatggttacatctgctgccaaaaaccagatcctatgaagttagttcagtttagtgatcttctcaccaagctgcaggggccatcctgttttgtaccatggtgatgaggcacagagcacaccctctttttaccttcaaagaaagaagccagacattgatacaggttactgtgtatgcagcagactatcctgaaggtttagggagacagagtattgatatctcagatctgcaaacaacagaacagccccttggggatcactatgatccaggcagaaggcagaatttgttttttaatcaaatcaccaattaatgactgaaaacagtatctcctggaacaagaaattattattcctctaggcttgaaacaatatgaaacagaggaaagttatttgcaaaaattggctgaatgtgcaaattatgcttccacgtgaatagcaaagtaattaaaaccattttcagaaagtgaactactttcttaaaacagcatgccgaaagtggtccagagttcaagattttgaaaacaaaaacaaagttggtacttgaattcacagattgaagctaactagaagtcaaagaaaagacacactggattatgagaaggagcagggatcacagccaggtgcagaacaaagtctgagcgtgcctgaccttccctggaggttccgcccatgtcacctgcccactgggtgtttcctgttttgaccatgcattccttagaccttctgttgttaaaattttttctccttgagaactttaactggccagaaattagaatccaattttgaaaataccaagctactttcattatgacactgcagttaagcaaatattacccaaatttggacagccttgtccaaatttgttttatattgttttatatttagcaatataaagcaaagtgtcccatttaaaaattggtaaaaccttataatcaatatgcattaaaaatttttagtatcacatcattattaatggcaaaaatttccatttataaataacagaacttttgttgattgtatttattcttccatcctgggatttggggttttttcaattttgttttttaagtttgtttttaattttttttttttaattcagaaagagaccttgttgccaccctctgcatactcagaaaggaaccccagtccgtgcagaaaggggccacggacagtggctgtccacccaggatgggcccaagaaaggagtcgatgtcctgaaacagtccctgcccctttcctgagtgttgggggatggtgggaacgacgaccatgtagctcctaacaaagggcgtctgcctctgggggtgtcctggggcgtggcttactgagggcttactgaattttaaaaattcagatttcagccaggcacggtagctcacacctgtaatcccagcactttgggaggccaaggtgggcggatcacctgaggtcaggagtttgaaaccagcctggtcaacatagtgaaaccccatctctactaaaaatacaaaaaaattagttgggtgtggtggcatataattgctgtaatcccagctactcgagaggctgaggcaggagaatcgcttgaacctgggaggcagaggttgcagtgagccgagattgcatcattgcagttcagctgggcgacaagagcaagactctgtctcaaaaaaaaaaaaaaaaaaaaaaaaaattcagatgtccagcttttcatgaaaaaatccaaagttctggtcacacgctggacaacaatagccataggtgagcacctgctgccctgggaacaggcacgtgccctccaggtggtgaatgacccacttctctcaccagcttcaattgtgtccatctaggacatttggaactcttccaggctgctgcactcaccaatggcaccttcctggcctcatgggcatttgagtttgtactcctggccaggacctaatgctgcagaccagataacttcctgggttcttgccctaaaggaggagctgaagccataagcgcagacctctaatgtggctcagagacactgtggagagagggcagtccaggcccagggtcttgacggtcccgcccctggacttattaggccccctctgcatagctcatagtggcagtgataccagacgtcacctaaaccttcccactcctgcggcacccactaccattcagcctcagggccatcctaaccttaactccaggctcctctctcacatgggactattccagctctgactttagctcccatgaagaactggctcccgagtcctggctccccatccaggacccaggttccagtcctctcaatgggctctccctgatagaggtcaccttgggtctggtggcctaccccatttcttacaacatacaccccacaccagccttgggccagccacctcctttgtgccccagaatggctgtcagggaagaccctgcctgtgtgccccaacctgtgggcaaggcaaggcctagggctctgcccaccaggaataacagacccagctagggaaaggcaggctttgagatgcacgtgtgatgttgaccctccccccgggtcaccccaatacccgtctgcctgattctctgttgccccacagggtcccagagagtgctgagctgcacatttgacaggctatgtgcccatgggtccaatgtgtccatggatgacctgaattccaaggccatcaggaaaagcctattgtgttgggcccccaggaagccaagccaggctggctaccctgggatcttcagaggagagcagcctagcttgtacagatcccctccatgggccaggccctagaaatttcacacaaaaaaattatccttttttacagcaactcatgagagagaccatgaggataccattttacagatgagaaaactgagagtgaaggaggtgatgcaaccaatgagtgacagaacatggacatgaaacatgtcttggcaactccagtacccaagatttctccatgtcagctgtcagcctgcctggctcacaaaaccttcatccccagtgtagaaaggactgatagacaagttaggggcttctctctcacagggcccttgtgtgtgcccacccttcacacacatacacccattcacacatacatacatacatctgcacacacaaacacctatggggtccacacacatgcacacaaatacacgcacaaacaccctgcatatccacacatacacacaggcatattcacacatatatacgtgcacctgcatacaaacacacacatagacacaaacacccataaatatccacacacacacaaacatgcacatacacacaaatactcatacacaaacaccctacatgttcacacatacaaactcctgcactcacacaaacaccttccatatccacacatccatacatatatattcacacacacacacacacgcatgctcacacacacgagcagagcactggaccaggagcaggagctgggactctcgtcccagatctcccatcacacttctcaagccttggcttcctcatctgtgagatggggttgtgccgcctgcttcccagagtgttgcacaagcaaacatgcatgacagcccaggaagtgagaagggtgtataggaggaaagggtcctgatttttggcagaagttgcccagggagtagtgagtgctccacacctttgtatgtgctgtaccttctctctggagctcttttctcttcttctctggctggtgaactcatcctcaccttccagctccaacaaccacactttgtgttcctgatgtctccctgtagtggaattcctccaccatcctcagtgtccccagctcctgtgtgagacaggacttcctacactggagtgggacacgtgaatgaggctgcatggctcttcggagccggatgagtcccgacttctcctgccacaacccaagtcccttcacagacccacagcacagtctctcagaggtatcttttaaggccagaccctggccttccctttgacagcactgatgcaaagctcctgatgtgactaggagtttaagaaccccctaagtgcccctagctgcctggtatagacctgccagcctctgcccatcctgcttcatctgctctgaccttttgctctctggtggagtccttgccatgatggcctgggcccagtctggtctggcctagggaggcgcttttctgcccaggcatcagggcctgtcctcacgcagagttcagaacacacagaggcaccccatcactctcgaggtaggcctcacacctcgcaagtcagcctcaaaaaagcaagtatgaggcaggatcccctttctggctttgggtaggggctgcagttcctcttgccatgtggaagcttcttaaatattgtactacaatatttaaaaatattccctttgttctacataccattaatagatcaactcttctacagctctgcaatcacttctgacttggcaaagctgagcctgagctcagggaagggctctggcttcagccttgtgaagcagaaagatcgtggactctcgcacaggacccctgtttacatttctctcaagcacagcctcaccttctcagtcctgctccaaaaacaccacacaacttccagttctgagaatgcaccctgttctctcagccctgggctttccacatgctaaccccttctcagaacctcccttccttcacttcgatacctaactgatttctattctccttcaaaaccccattctaacatcacctcttctgggaagcttctctgacttctctgaggccctcccaggctatcatttccttcctgataatggctccttatagcactggccacttatatggaagtggtgcatttgagtctctcccactgcaccatgggttttcaatggaagagtgtgtgtatcattcctctttgtaatcccagctctgtcatcacaagatggaattcaagcatgtacctggtagttgatcaagctctatattcatagagcccaaacccaaacctaaaccaagaagaaagaagaaaataatagaggctagtctagaaataacatagaccaggctaattccttaataataaagacaatagagaaaatacttccccaacccttgctaatgccaatgggaaaaaaatagagaaatctttaaaaaccaaaattggttatttgaaaagattaacaaaattggcaaatctttaactatactgaccagaaaaaagaaagattaaaatcagaaatgaaaaagaagatattacctctaaccttcaaaaataaaaaattataagtgaatgctatgaacaattatatgtcaataaattaaatgacttagatgaactggagaaattcctagaaaaacacagaaaccaaacctgactaaagaagaaatagaaagtctaaagaaacctttaacaactaaagagatgaaattagtaatccaacaactaactgcaaaaagaaagccaagccccaatggcttcattggtgaaattaaacatttaaagaataatttgcgttttaaaaatatttgcatttaaaggagcttttaaagaaaaattattatcaattcttcacaaacttgcaaaaagttaggcataaacacttcccaactcattctatggggccattactattctgatactgaaattagacaaagacatcacaaaaaaagaacactactaatacctcttatgaatatggatacaataataacaaaatactagcaaactaaattcagcaacatataaaaaggattatacacaatgatcaagtgcagtttgtcccaggaatgcagggttggtttaacatccaaaaaatcatcaacgtaataccatattattaattgttctattaatactatattaatagaataaaagatcaaaacctcataatcatctcaatagatacagaaaaaaatgacaaaatacaaaactccttcatagtaaaaacactcagaaagaataaaagagaatttcctcaacctaataaagcgtatatactaaaaaagcagcaacaacaaaaaaaacatagataacatcacatttaatgggaaagacaacatgctttccttctaagatcacaaaagaaacaaggatgtctactcaccacttccattcaacatcatactgaaggttccaactattgcaattatataagggaaaaaaaggcacccagataggaaagaaagatgtaaaatggtctcaattggcagatgacacgatttttctatgtagaaaatcctaagcaattcacaaaaaaattaaaatatgtaaatgaattcagcaagattttagcacatgagatcagtttgcaaaaatcaattctgtttctatacactgtcaatgaacaagacaaaaatgaaattagaaaaataattccatttacaataacatcaaaaaatacttaggaataaagataacaaaagaaatccaaatggtatattccgaaaaatataaaacattgttgaaagaggtcttaaaagatcaaaataaatgaaaatacatatcatgtttttggaccagaagacttattgttaaagatagaaatatcccagagttaatctataagttcaatgcaatctctatcaaaatcccagatgacttctttgcagaaattgacaaggcaatcctcaaatttatatggaaaatcaaggaatgcagaatagccaaaataatcttgaaaaaagaaaaacgaagctggagtactcacgttttccacattcaaaacttactagaaagctacagtaatctaaacagtgtgatactagcataagaacagatcaataaaatagaactgagagtccagaaataaatccatgatctatctacatacatctattgtcaattaactttttttttgagatggaggcttgctctatggcccaggctggagtgcagtggtgctatctcagctcactgcaacctccacctccctggctcaagcaattctcttgcctcagcctcctaagtagctggaattacagacacacaccaccacacctggctaatttttgtatttttagtagatacggggttttgccatgttgcccagctggtctcaaactcctgagctaaaagtgatccgcctgccttggcctcccaaaatgctgggattacatgcatgtgagccaccaggcccaactgtattgtcaattaatttttaacaagagtgccaagaccattcaatgggggaaataataatcaaataatctcttcaacaaatggtgctggaacaactggatatccacatgcaaaagaatgaagttggactcccatcttacaccatatagaaaaattaacttaaagcgggtcaacaacctacatataagagctaaagccataaaactcttagaagaaaacataggagtatatcttcataattttagctttagcaatagagtcttagatatgataccagaagcatgaacaacaaaagaagaactagataaattagacttcataaaaatagtaaactttcgaacatcaaagaaaattaccaacaaagtaaaatcatacatctaataaaggtctggtatccaaagcatttaaagaactcttacagctcatcagcaaaaacacacaactcaattttaaaatgggcaaagacttgaatagacatttctccaaagaaaatatacaaatgccaacaagcacatgaaaagacactcaatatttttattaattagggaaatgcaaatcaaaattgcaatgaggtaccaattcacacccactgtatatatatgtaataggtggatggatatatataatatttatatataattatttataatatgtatatataataatgttattatatgataaattatataatacatatataatttattgatttgagacaggctcttgccatgttatccaggctggagtgcagtgacaccatcacagctcacagtggcctgaacctcccaggatcaagtgatcctccacctcagcttcctgagcagctaagaggtactacaggcaggcataaccatgccctactaatttcttaatttttttgtagagacaggatctcactatgttgcccaggctggtctcaaattcctggcctcaagctatcctcccaaagtgctggcattagaggcatgagccactgcacctgacttaggatggatatatttttttcaatggaaaataacaagggctaacaagaatgtagaaaaattggaaccctcagacattgttggtgagaatgtaaaatggcacaactgctgagaaaagtttggtgatttctcaaaaacttaaatatagaattatggtatgatcaagcaattccactcctaggtatatacccagaagaactgacactgactactcaaacaagtacatgtatctttatagcagcactatgaacaatagccaaaaggtggaaacaacccaaatttccataacaaatgaatggataaacaaattgtgatatacaatggaataatagccataaaaaggaatgatgtactgatacatgctggaacatggatgagctaccaatttacaggaaacacagaggacaggggacatgttgaatagcaccatgagagtgcagtcagcaaaatccagactattggaaactctacagatcaaatgacctgggtcttgggagggggtaggaaaacctgtgtattaaccaacttttaaaagatgtatttttataaaataagtgagatttaattatagggtgtagggatatacatgtgggtaataattagactatgaagcaaaggaaaggagtgtctactgtaagtcaaggtagtggtgactttggagaagagagtgaggaggtgcctctggacaaagttctgtttcttagtctaggtggtggttacaaagctttactcttgtaaaaatccattaagccatgcatttgttttatgtggcttcttatagctttgtttatttgcaaataataacctggttcagagattctgattcacagggtgtggggcagagttcaggaatgcttttaaattttcccgtgttgtgtgcgcacacacacacacgcatacatatatatctgtcttccacaccaggctggtgcctgtttgaggaaggtctgtggcttgcctcaatttggacttcccaacctccagaactataagaaataaatttctgttctttatgaattacccagcctcaggtattcttttatagcaacacaaaacaaaccaagacagcttctatctctctcctactgacctatgagcagggcatgctttgtttctgtctttgcattcagcacctagcacacagtaagtgctctgtaaatgctgatgaggctgggctgatacacaggtggactgacagtgggcataccagacaagatccagtggcccctgaagcagtcaactcacccacagcaatgctggagggctatgaacttcccaatctcactgaggaccacaggagcattccacctctactgggcagtaaaatccagaacgccggctgcagacattccacttagagtcatgccaacatcctctctgggccccactagcttaagacagagccacagacacaggcgtccagaattaagagtccatctcagccctgaggctgatttctcactacacactgaccctgagaaaaacttcagggactgcaaaaggcagccagaaacactgggagaagggagggaagaaagcgcctctgaaatagacagaaacactaatgcaccaccagtgcctctttcagacataagccagtccagctccccatgggcaggcccaggatcacacaggacactacaaaccaggtctctgcccaagaaccaggctgtaggggccaccagagcctcactggaacaggttaatgcagaatacagtcatgtacgtccaaacggagctacaggccttccccgttaaagacagtgccctccccggggtagaaaggaaaacaatactccttatcagcatgaccattgtatgttaagtcttgtgatgcatgtttgcaagttactccaagtaactatggatcttgtccccaactcaggccagccagctgacaggccctgaagtcagcagctacagttggctgattctgaacccagtgatgcctgctgtttgcagggaatgagatacttacttaattatctcaaatttaaacactcttatatgtttccttaatttaaaaaccatacacacacagaagtgaggacatctaaaaatgggatctgcgttactgatgtgtaagccagaaaaaaagaggagttctcaaatacactctgagctggacttcacagctacgccagttcctcaagtggttcgtggaggtgagcggcagatgcaggccagtcttagaatgtgaaaaatctgagagctataagacaattcaaaaacagacaataagtcaaatcccattgaattgtgttattttaaatataaagaaagaaatgtacaaacatttaacagaaaattagattccccctgtccccacaaatcaaatccaaaattacccatgtgaaaacttcacggcattatccactttccaccaaggcctccacgtgctcgttctctggccaggccttggtagtgtggactggtcaccatgtaaggacagccttctgtgagctgcagaccaagggaggtggcctggcagcctgttggaggccaggcaaggataaaatttactatcaatccttttttttttttttttgagatggagtcttgctctgttgcccaggctggagtgcagtggtgtgatctcggctcactgcaacctctgcctcctgggtcaagcaattctcctgcctcagcctcccaagtagctgggactacaggtgcatgccaccacacccagctaatttttgtgtatttttagtagagacagggtttcaccatgttggccaggatggtctcaatctcttgacctcgtgatctgcccaccttggcctcccaaagtgctgggattacaggcatgagccaccatgcccagccatcaatccctttttatgtataagaaataggctcagagaggccagatggcatggcccagtttgcacagtaaggtgattgcctgtcacggccaaatagccaccacgtccggataatccatggccactggtttctgtgaggtggtggagaggcggcctcagcctgagccctctggatcgtgggcaacgggtggtgtgaggaaactgtccagcagtgatctactgtccctgcactcccacactgcagggccaggggtgcatctgcatcccacgcggggaatgcctgggcatgaggcttcaagaagcacttagcaggaatgcaccgggtgctcagaggagccgctgtcctggcaggctttgctgtccacatttgcccctttgcacggagcctgctgtccctgaagtgctctgacctgtccacaggaaaccaggtcaggcacaaaataaccacccttgtctcaaagcaagggccctaatgcctccattccttcaatgccttttccttcagccaaggtcccctgcagtcttgtcctgggcactgaactgggtgctggggatgggctggattatgaggaaggaaggtctctgctctcaagaagaagtgggtcccccatcctagggcagaaggcactgccatcctgagtcagcttatcgcagctcagatttcactccctctgtgctgggccctgggaatggggagatgacactgccatggccctgccctcaggggctccccatcacgtggggaagccagacacaaaggtaaatttgggaggaagcccccaatgcctcataagctatcaaaaaccagagtccacagcaatgggaaaaacaaggcaaggaaggtaacctgcaaagaaacgagggctggggaggcaacacgcaaacagccagaggagactgtgaggaggccccccacagactcatcacctcaaagcggagccccaggaatgaacagtcagctctaggacgtgctaaatgccccaggagaggcacgaaccaggggaccactgacaccactcggccttcggaggtgagaggcggcttcccagaggagggcatattggctgagcaggatttcctcaggtagacacagggggaaaccaagcatcgcaactgaaggccaggtaacacagatctgccgaaagagacatcatgattttcaaacaagcaaacgaaagggattcattctattctgcaactgtcaggcatactcagaccaagagtaatctttcaaataaaccccagaaaatgaaatcacgtatgccatgttctagccccgcagtggaaagtggtttagcctctggtcccggagtcttgcctgtctcttctcccacccacctcccctgcctctctccccttcccagctgcccagaaggtgactaactgcatgtccacttttttttctgctgattcttcccatttctgatattaagtagcactttctctgcaagcaaagctacactgatataatacagatgaaactgggaaagtccaggctaaatttcaggatacgtatacagaaatgcgttgagatacagcacctcactcagcaaccatgccttatagatagtgctaagcttcagtcgcatcacagaactttctaccctgcatgagttctctgacctggctgtgagcttcttgtgggtggggtctcagtcattcccaagcagccagatgtgtctcagtgcctggcatacagaaggcatatgataaatgtttgctgaatgagtaattcacaagtaggtccattgttataaatgaatgttttggaaacacaagctgtcactgagttccacgtgtcgtgttctgctttcgaatgacctgccctgaatatatctcacatgcagtcttgcatatgcctgattcagacttttgctcacagctacggggaggtgttgagctctgcatgggccagcagatccaggcagaaagacttccatgtctgtacagcagcatttgttcattgctccaatggtttattttcccctggttttattaaaatagtgaaaaacactaaagtggaagggcttacactcaagagcaacacaattggaatgacagcatgggttttcaggggtgcccaaagaagtccttcccctctgttgtatgtccctaggtcttaagccactacactgaattcatgtgtgaaggaaaggaacaaaattcaagggtgtgtatgaaatgctagcaatatagccttgaatgctgtacctggatgtagagcaggaagcaaggcttgtaccgtctcttccttacctctctgagaagggaccccaccccaaattgatctgctctggctccgacacaccccctacatacgacccactctgtggaggcaatagggaagtcctgctctgtgtctgaaaatgtcaaagacagcttattcctgggaagccatcaaatacgccctgctctgctgtatatattattcaagtactcagtaaaccctttgtttctggagagcaaaggccactggcagcccaacctctgcccagacaaggaggggacaggcagggagctggcaagggcacacaggatcatggccagagggtgagctcagtgcccagaatctgtccccataggagcacagggtccccaggctttcaattctccagacttcgtttcccagcctataaaatgcgtacaaaactgacatcctctcgggatgttaagattcgatgatattacaaatgtgaaagcactttggaacccataaactgctgtatcaatactggttgatcgtgctcttattaagattattctattaataacccatctcaaattacatatctgtagacagtgcgtttgtgcatctattgggccagctgctctccaggccgggaagccagaaagatctcatggaggagctggtcctcctacttccttcccttgctaaggccaaacctgcccgaatgagcttcatctagagggcacctctcaggctcagcacctggagcagccctccatgtggacagccgggcctgtccagcccaaccagagggggccgtggattttgtccatggctgtttcccagactccatggcagtgatttagatgcccctgccccctggccgcacgctggaacatgtgcacctggtttctcccggcactgacctacttatccatcagttactcaactgtctactgacgtgtttattgagcatgtcccaaaggccaggtaccagaccacttgctgcatgtgacatgcagacacatatggaaccaggccagcccttgaacaatcacgacaagtgtcccaagtgctacaaaagagaaggaagggatgatgttgcagaaagtggggagggaggggcagtgctaacctgctctggggtctctctcgaaatttccttttgtttgtcctgctgacctttctatgcatgcttttactctgaagtcacaccttttcttaacctgtagaaaattctcggtcatgtcattctaccactccttctactgtatcttctctaccattctctccacattttctccttcagaacattggttgttaaaactcagccattttttaagttctcttccatagtttcatctccttctatctgtgagctgcttttagttttccattcgcaaattgtatctttgactagctcatctattgatttaattatcatagtttttatacctagatttctactcagttttttttcagagccaatctgttcttaatttataccttcctgggtttattttataattactttttatgaatgctatttcttcttctttgtgggtcttaagatgcttaaggctttttggttttgagatttttctcatatttccatttatttggcagtgaattcatctcctattattagttttgtaacctttcttagaattagttttttcacatgcttcaaaatgttcgcttgcaataggaattctgtgttttgttcttcccactgcattaacctcccagacccacccgcaccctcccaggattttgtcattgctcccatctggccttctagagtacccagtcccaaatgaggcttgctctgacagctccgaggttctgaaatgccaaaacggaggagttagccagtccagtcattggcccagggcctggcccaggaactacctttgagcctccctttgcccccttttgccctcttaggcatgcaggtcttgctagccttagccctggtagcagttccagtattttgcagccacctgtcacaggtggctggatctgccctcgctcccagttcccatagcccctgacgcaagtgagatgctttgggctctcaggtcctttgcccatgtcagagcccagaggtgtggtctcactatgctgtggaaccccagctgacagaaccactcactgcccagggatcctcagggaggttgagaagggaaagcagattgctttaaaggccgccgttataaagccatagccaaagcagctgtggcctgtgaaatggacctacgagaaacacagcaagagagaaggtgtgaaaaccaggagcgcctctcagtccctgcatgaggaagcaatgtgactgtttgatggccctgagttatgtgggggtcatacaggccccttagctatatcatcattccaacagcacaaagacatgaaaaaacctacagtttgcaagcagctgccccagagacagactggcaacaccatgaggccaaatcatacaattgcacagagaaggcagcccttctgtgtgcctgtgcagccttcctccctcaactggcattgcacctagggcaggccctatgtccaaagtgagcagtgatatcagggttacttgcccaggtcactgaccagtaaacgacatgtatgtgtcaccggtcagttgctattggtataaacacttcttctgtaatatatatggcctagtatccatttgggatggttccaaaccataagttggggttctccaggtttggaatggtgcatttcagaaggtaaaaataccagaaattagactacaagaaaatgatgtgttagagaggagtgtggggtaaggagactaacagcagagaggcaggcaagattcaacattttgagatttattttgtgttattggcaagccttcataggctttttagcagggtactaacaaggaaatatttaggaagaaaactggtagccacatggatgagctgttggagagaaagagactagagacagtgtctggagtcaggccagccccaggttccagttttatactcctctgtaggtgcttttgttccaaccttggtccagattcactcctaaattcatcagggtttccactccttgaagtcaaagaggtctaatgaacacagcactttatgcatattacctttctcagccatcaaatcattacaaattagaacttggaactggagagagcaagttacttgcctaaggacacagctattagacaggtgtatgggcttcccaagtgatgcaccaatcctccctctccccaagcaggatgcagagggcagcaagggaggggttccaaatgggtgatgtggtgctctcgcagcaacccaaggctcaggttcagctctagccctcagtactgagctaaaactggccaggtgcagtggctcatgcttgtaatcccgtcactttgggaggccgagttgggcagatcacttaaaggtcaggaatttgagaccagcctggccaacatggtaaaaccccatctctactaaaaatacaaaaaaaaaattagccaggtgtggtggtgtgcacccatagtcccagctactcaggaggctgaggtgggagaattgcttgaacctgggaggcggaggttgcagtgagccaagatcacaccactgcactccagcctaggcaacaaagtgagaccttgtctcaaaaaaaaaaaaaaaaaaaaaaagaaaagaaaataaaaagaaaaaagacagtactgagctaaaactgaagacagttagggaggccctggtcatcctctcaccccttctcccttcatgtccattcacccccagccccaagcccagccagtggtcactggggccacacgtccccatctttgtgctttgcacatgggtcctctgacccagctgcctcccacctggatctgcctgaagaactcttcaatatacagcttctgttatcagacgctcatttcggggggacagctgccacaagtgtggcctctgcagccagagatccaagttcaaatcctgattctgcctctagtgagctgtgtgatcacagtcaagttatttcacttctctgaatctcagcttttcatctgcaaaagctgtcccaaggtcattttaataaatgcatacaatagctgctgcgaagcgctcagtattgctgagaactactggcgtctataaagttctgagtcagggttaacagctgtggcatgtatggtaattgtttgcttgcgaatcatccttcccctcagctgcctgtgagttcctcagggagaggagccatctttgattcagggctatgttccagtgcctgaaataaggcatacctcggaaatgcttgttaaacaaaggaaggaacgtgagagtgaatgatgacaactctctttgccaaacattctaccagtgactcctttgcgaaaactggctgcaggatggtgattttgatttgctgtaaacctagtgccaattgcttccatctgagctttagataggtgaagagcctcccctcgccccgggagtgtcacatctatagccagggcaccgtggataatccattaacacggattccctctctgcagcctcaatgaccctgtcagttcccagctgctaagaggttgcctcagccatgacctgggaccatgaccatcatacctgattcacctggacctcccacttggacaccctacctggacaccccacctgggaatcctacctggacatcccacctggacattccacctggacatcccacctggacatcccacctgaacatcacagcttttgccttcctggcttcagaaaacctaaagccaagcctggccacaccctgggagtagcagagctttggcctcacagaagcagcagatgtggagccaaactttactgtggcctgaggacctggctttgaacctagctctgctaactgactttatcaccttgggcaacttacttagcctttggggacttgatgtccatttatctaaaatggaaatagtgctagctatcgcttcttgagcactcatcaaattgacagggaaaggcctcattgttatttctattcagcatcgccttctcaggagcatgggtccaggtttctggaggatacctgaggaccaggagccctgatgtgtgggccgcacgcccacgtccctgcccagacaggcctcccctcacattgcaatttcagtccttggctgaaattcagtcccttggctattatactgctcccaggtggggaggagttgagagttagagacaggaaagaccaagaagaggaaggtgggagaagactcctctctgtgtttataaaaatgcttttggatgcctgctagcatcagaaagattttagctgccaattaacaaacagtggccacagctgaaggtgacaagatgttccttgcatcttaagctgatgctactgtttgcaagacatgagccttacattatgtcaaaaggtgtttactgaatgaatggatgaatggatccatcagctcacaggattaattaagattttcatcatctgaatgtgaaattatgtccatgtgcagagcctccattcctgcccagcggcttcatcacagccaggtccctgtctctcctgggtcccctcaatggctctccttcctcccaggtgtctggggaaggacagcagcagtaatccagggacagcctttatagcggatgaagcactctgccagacaccgctgccctatctctataggattctcatctccactgggagaaaaatacttactattataagctgcctcaaattatttccaacaccactaaggaactcatggtaaaatataaactcaataaagagctgggtatggctcttaccctgaggatagggtgcagctgcgagctgactgttctgagctctgccttagaacagagtggcagtgtttcctagtgcccaggtgactctctctgctgggcctgctgtggctcagccctagatccaacaaagagagggcaggagcacagcctaggccttcttctggcatcccagctcactgtgggttgcaactcaccagtgggtgtgaaatccatcacgactgagaccagtaagtttttaatgaaatgaaatacaaaaaaaaaaaaagttagagtttgtatatgcgtgcatactgtgtcacaccgtaatttgttttttttttgttgttgttttttaattttattattattatactttaagttttaggatacatgtgcacaacgtgcaggtttgttacatatgtatacatgtgccatgttggtgtgctgcacccattaactcgtcatttagcattaggtatatctcctaatgctatccctccccccaccccacagcagtccccagtgtgtgatgttccccttcctgtgtccaactgttcgcactgttcaattcccacctatgagtgagaacatgcggtgtttggttttttgtccttgcaatagtttgctgagaatgatggtttccagcttcatccatgtccctacaaaggacatgaactcatcattttttatggctgcatagtatcccatggtgtatatgtgccacattttcttaatccagtctatcattgttgtacatttgggttggttccaagtctttgctattgtgaatagtgccgcaataagcatacatgtgcatgtgtctttatagcagcatgatttataatcctttgggtatatagccagtaatgggatggctgggtcaaatggtatttccagttctagattcctgaggaatcgccacactgacttccacaagggttgaactagtttacagtcccaccaacagtgtaaaagtgttcctatttctccacaacctctccagcacctgttgtctcctgactttttaatgatcgccattctaactggtgtgagatggtatctcattgtggttttgatttgcatttctctgatggccagtgatgatgagcattttttcatgtgttttttggctgcataaatgtcttcttttgagaagtgtctgttcatatccttcgcccactttttgatggggttgtttgttttttcttgtaaatttgtttgagtcataatttgttttttgttgttgttttgctattttttgagacagagtctctgttgcccaggctggagtgcaatggcacaatctcagctcactgcaacttctgcctcccaggttcaagtgattgtcctgcctcagtcacccgagtagctgggattagaggcacccaccaccacacccagctaatttttgtatttttagtggagatggggtttcaccatgttggtgagacgagtctcaaactcctgacctcaggtgatccacccgcctcagcctcccaaagtgctgggattacaggcgtgagccgccatgcctgacaggtaatttgtatttctaactgtagattgtagtcaaagtttgaacgggtcagccatgcgcacaatgccagcctgcctacaaatgtagactggggcctttgactcatgcctgtaatcacaatattttgggatgtcgaggcaggcagatcacctgaggtcaggagttcaagaccagtctggccaacatggtgaaaccccatctctactaaaagtacacaaattagctggatgtgttggtccacaccagtaatcccagctactcaaaggctgaggcacaagaatcacttgaacccgggaggtggaggttgcagtgaatcaagatcatgccattgcactgcagcctgggcgacagtgtgagactctgtcccaaaaaaaagaaaaaaaaagagtaggttgggaagccagtaactaggaacaggctccatttaatccatcacaaaaagaggatttgagcagagaaggcaaagacaaacccttgggcaggcagcatctgctctgctggacaagctgttttcaaccatacctaatgatggaagcagggactacattgtccaaagcaaggatcttgggacccagtgggggctcaacgcagcaaagggctgctgatatgctcatctaagatcctgatgggtgcccgtttcttacagaactgtgtgctcacagctgtgctcagtgggccacatggtcctgcccgtctggccagcccatcttggttccactgtgttcctggagtccttactgctaggctctggctgatgctagcccctgtgatgggctgcccgccccacatttcccctggctggtctccactctctcggctactccctgctctgtcccataaaagcactcaaggcagccttctcatctagatcattctttaggcctggagttctttaatctgagggcttttgcacaccctgaattggatgcaaaagggggtatttgtcccatgtgtgtttttctgggaaaaggactcacaattttaccagactctcaaaagcatctgtgccctcagcaaaagccccaagccctgcctcaggaagcctgatctgctcaggctgggtgactatctgtccgtgtctgtcccccccaaagtggcgttcagcaactgatgctggggcaaactgccctgccatctgccagaatgtaaagcatcagctgtgtggaggatgggcggggggctggaccccagccaggccctttcaaaggcactaggggtttggctctagcatgcatccctgttgtgggtggcaaaaaccactaccgggagtcaggctgagctggcttaaatcccagttctgtctctggctcattctgcctccataggcacctgtttaacctctgtgaggctctgatttctcatctagaaaatgccgataagaagatgtaccttccaggattattgtggcaattaaatgagatactgtaagaacagccactttaccgcctataaatgctattttttttaattgactcagtgaaaaacattttaccattttaaataccctcaacccctgaagcactgcagctcttagctctatgacctcaggaaaattacttatttctgtcaactgtcctacttctgacaaatggggatggcttcatgttggtgttcgcaagatgacaagtcaacacgtaggaagcacttgaagcagggcctgggtccttgtacagtcttgcactgttatttctgcaagaaaggagtggcaggtgaagagtccctcccttagactgtgcctaggagcaaaattgccatttctgtctgtcttagtccattttttgttgctataaaggaatacctgaggctgaatactttataaacaaaggaggtttctttggctcacagttctgctgggtggaaggttcaagactgggcctctggtgagggcctcaggctgcttccactcatggcagaaggtgagggggagccggtgtgtgtagagattgcatggtgagagaggaaacaagagggaaagagagtggtgcctagctctttaacaccagctctcacaggagctaatagagtgagaactcactcactacctctaggacagcaccaagccattcatgaggaacttggccccatgacccaagcacctctcaattaggccccacctccaacagtagggttcagttgttcttcctgcctcctgagatggagtcttgctctgtcgccaggctggagtgcagtggcgtgatcttggctcactgtaacctccgcctcccgggttcaagcgattcttctgcctcagcctcccgagtagctgggactacaggcatgtgctaccacggctggctaatttttgtattttcagtagagacggggtttcaccatgttggccaggatggcctcgatcttctgacctcgtgatccgcccacctcagcctcccaaagtcctgggattacagacataagctattgcgcctggcctaggggttcacatttcaacatgaggtttgaggggacagacattcaaactatagcactctctctccttgcctctccttgccgatgggccaccagaaatctctcttcccttcttcaccaaacactgctccacctagacagtggtgcagttgccagaaggcacatgttgcctagcacagaacctcccattctgtccgttttattggcactgtgggctcaaatgctaatgaaacacatggcaagacctcgaattcagtccccatttggttggtgaggaagaggccctactcactgactttgcattcatcacctctgaccccatcacgacctctgagacagagccaagaagcccattttatagatgaagaaaccaagcctgagtggggtaagcacttgcccaaggttacacagctggcaaagggcagtgaggtctgcctagacctcacttgctcctccatgccatgaagctctcttattcacctctttgttagcaaatgtcttaaaagcatttgaagtgcctgaaatgtcaaaatccagctggcatccccattagggagggctcatccactgagtggacagattatggtgacaggtacctgccccggtcttcccacacaccccagcaaggggtcatatgtactctcttccacagattgcacctcccgagttttctctctctcacacctcccttctcaccaccatacccttgacccagtaatttctcagaccctacatgtctccaccagcccacgtgcccattagactcaaggagaggaaacggcagaggttcaacctagcaagcccaagctctgggttttctggctttccctgagtgattgtggcagggggtgggtcactgaaggttatcagcatatcactggcttgaccctgggtgggaggcagggagggcttcccgctttgaggcgccccacccccacccctgtgaacagggtaattatggatagactgggctgagtgatggcctggggtctcgggcatctgcaggctgcccccaggctgaagcatgcctgccagtggcttttaggcccatatgagctggagggtccttccttccttcccaggctcacagaacccctgtggggctgctgtgagtcctgtgaggccacccactaagctgccaccccagccaggcagccttggtaggaacagcccagaccaaagggagattggagccaggaaattccacggtggtgggactggcctgctgtatgcacagattcaggctctaggaggccctgggaagggaagggccctgcccacacccacagtccctcagggcaccccctggctaggcttgtgtttcccccctaagaagacctttacagagcccaggctggagtcctggacgtgggtgcaggaagggaactcagagcttccaggcggggctggcagccacacctctgctgctcctctgccaggccctggcatggcagagccagcctgggcggggaacggcaagaggagcaggaagcagagagagggtttctgtgggggtgtaaccgcccaaggggttctcctcacctgctgcccagatagccgatttatcatgacaggagaattgtaatagagaaagactaattcatgcagagccagctgtatgagagaccagagttttatgattactcaaatttttaagtctccctgaaaattctgagactcaggtttttaaggataatttggtgggtagggagtcggaaagtggggagtgctgattggtggagtcagaaataaaatcatagagtgtcaaagtgggattattttgctgtcttcattcggttcctgggtggcatcgcagaactggttgagccagagtaccggtctgggtgcctgctggtgcattggaacacagggtctgcaaaatagctctagcattaatctgagtttttacaacagtgacgttagccccaggagcagtttggggaggttccaaatcttgcagcccctggctgcgtgactcctaaaccgtaatttctaatattgtgactaatttgttagtccttcaaaggcagactggtccccaggcaagaagccaagaagcggggttgtttcaggaaagggctcttatcatttttgttgcaaagtaaaactataaactaaatttctcccaaaattagttctacctacccccaggaatgaacaaggatcgcttggaggttagaagcaagatggagtccgttaggtcggatctctttcactgccatcattttctcactgttataatttttgcaaagtcattttcagggggaggaggagtttcagtgctggggcttggaatggcctggcatcctgccccaaggagcccaggaacccacctcgggctgcaatgggatcagagctggttcaggggtaagggtcatgtccagaacaccctgggactggcatggaaagccctggaggaatggcagcaagggccatgcgtcagaggcccatatctggccacccattttactcaacatggggccagagtcctgagggcagtgacttgctaagaccacacagaaagaatgggggtgagtgggaggagtagtgtcttccagattgagcctgcggaccagaggcagcctgagggtgtgaaagggccgtggccaaagagcactaaccctgctcaaaggtggccctctttgggccgggtctcaccagcagccagtgagcgctgtggtttccaagcaagctattcggagtgcaagccgtctgaggaggccccacatccaaacacagacacaggcatgagcgcgtgtgtgcattcacacacacacatgagcacgcccatgcacaccccgcaccatgcacacacacatacacacatttcaaccagaagaatttctcttttctctcttctgtatcagattttgatgactgaagccaataaaattgcttttttaaaaaggcagtggccacagaagaatgggcacctttgggagtcagaagccactgcaactccatgtcagggcacttacagctctaagattgctgaggtcaggaagtggcgagccgggttcacataccacacacataactcacaccctctatactacacataccccacacacaaacacacatcacacacacaaccacacacaatacatacaccccacacacacacatcacacacacagccacacatatcacacacaaccacacacatcacatacacataattgcacatgatacacacaccccacacacaaacacacacatcgcacacacaaccacacatgccacacacacaaccacacacatcgcatacacacaatcacacacaatacacataccccacatacaaacacacatatcacacaaccacacacctcacaccacatacacaccacatacatcacataccacacacaccacatataaccatacacatcacatacatcacacaactgcatacaaccacacacaatacacaaccacacatatcacatacatcacagtcacatacacacaaccacacaaaatacacacacccccacacaaacacacaaccacacatatcacacaaccacacacactacacaccacccatacaaccacacacatcgcatacacacaaccacacagaccacacacaaccacacacatcatacaaccacacacacaaccacacaaccacacacgacatgcacaccacacatataccacacaaaccacacagaaccatacacatcttattcatcacacatcaatcacacactacacacaaccacacacactacacacaccctacacacaaatccaaaaccacacacatcataaaaccacacataccacacaccacacaaccacacacatcacatacatacaacacacatataccacacacaccacatacaaccacacacatcacataatcgcatacaataacacactgcacacaaccatacacaatacacacactccacatacctcacacacaaattcacaaccacatacgtcacacacacaaccacacacaccacaaccacacacatcacattcatcatacatcacacaatcacacacaaccacacaccacacacagtgcacacaccccacacacatacacacaccccaaacagtacaccacacgtgaaacacatgccactcacataccctacacaatacaacacacacacaaaatacacacacagcatacacacatcacacacaccacataacacagcacgcactacacacctcacacaccacacataccacacacactctacataatacgtcacacataccacacaacacacacacttccacacaatataccacatacacaccgcacatacaccatactcacatgtgccacacacataccccacatgatatatcacataaacacacacacacttaatttggcatagtcagcaagataagtgagtacagtacctgcacgtgaaattggcatttggaagccccgggatgctcctggggacggaggactgcggggagaagacaatgtgactggggagcaccggccattggggaggagatggtgcgaccggggagaaccaggagtgtttggagggacaccccaagaaacgggtttccatgccctgtgtgatagcaaaggtgctccttagacccatcctgtgctcaatctaggactggagtgccagaaaccagacctaaaggcattggaagggaaatacagagatcctagcacaaggagtgaacagtgaggggaagaaggagcctccgaataggcctggagactggaattgccagcgttacacatttctaaattgtttttctgatgctctctctaagaggggaggcactatcactcttggataaaggcacagtgttacaatgtccttctgatggcacacttgcccaccttagctttaacctcacagaaggtgtgcttctgccaattgctatgcattgaccagcagtcatagtggagctgacaccaaggagctgttttctttgcctctgattccttctcaaaattgcaccaaatatttgccatggcttctggctggaagtaggaatgttgttctgaacaatattatggggtggcggtgagatggacttgagaggcatcccggactcatgactcatctctttccctgcatccccagaatcctgtcacattactcttaatggtccagaaaatacaaggactcctcgaaggatgaaagaagggatttggtgagcagaggaaactataacccacactgtgtgcagtggaggaccagtgagaaagtgtggggggcttatggagtgcttccagcagggaagaggcacgtagaaggagcagagggccctggagccacagcaggcaaacctcttgggaatatgagacaaaatactacacatacgaaaccacatttgttcattctccttgccagcagaattttacgaagcccctgactcagtggctgagtgcagccctccagaagaatgccctgaagatgataagcaggatagagcacaggctgccatctctcttgcctaaatcactacattttaagaaaaagataagttcaatgatcctagcttttgcctcttcttgtacataagacaatgttcaagaggattagagattatgcttctataatctataaccaggtgcacccaaacattgaggagattctgctctaatgtaacttctgagcacatgcaaaacctccactgccagtatagaagctgtgggctgccacattgctttggagcagtctagcagaagttctgtgaaaggctctcctgggttgcaatcctcagtgagacttctgaataaaactaactttaattatcgaaaagcctgatttttttctttcattgacaggaaccagagttgagattgttggctctgtcctccttcacccagcagcaggcaactttgggagcgggcacttgagtaggagtgtgaaggtagccccagaagcactggggacctcccatgcatagaacactaactactggcacactcagcccagtagaattctctccacctccccagccctggagacagccttcactgcttgcaggtaacaaagataatgctcactgaaggatctcagagaaccttaggtcaaagacaggtattcaaacaagacataaacaattgtgaaaaaagtcacaattgaataccagcaccaaggaaatagagttaattgaatgaagagattttatttatttatttatttatttatttatttatttttactttttgagatgaaatctctctctggcgcccaggctggagttcagtggcgcgatctcggctcactgcaacctctgtctcccgggttcaagcgattgtcctacctcagcctcccgagtagctgggattataggcgcagcaccaccatgcccggctaatttttgtatttgcagtagagacggggtttcaccatgttggccaggctggtctcaaactcctgatctcaagtgatctgcctgactcggcctcccaaagtgctgggattacaggcgtgatccactgtgcccagcctgaagaagagattttagaagaaggaaatatctcaagaggaatgaaagtatatcaagaacaagtgattatagaaatgaaataattagatcttggcaatgaaagatatgattgtcaaaataaactaaataacttaatgattaggattagtatcatgataacatacatagagaattagtgatgtagaagaacaaggcaagggatactccagaattcagtgcaaaaagatagaaaggctgctagtggtctaccagattccagtttcctcttctttcagagtacaaggctggactacatgcaggttgatatggccacgtggctaaattctgtccaatgaatgtgagtagggggtctgtgtgctgctgatgaactaagggcgtgccttctccctgctgtcctgcttcccactgcctatagccagctctgcaagcaggtgaggatggcacactagagatgtcagagaaatggaatggagggagatttgagcttgtcaatgtcaaataaaagataaaataaaagattagagatgaatgtctaatgaatgtctaaatttaaaacattttatttggaagcaagaattgcaaattggggcatacacacagagtgggtagtcttaggtctgttcaaagaacaaagaaaagatgggaggttttacaaaaaggataaatgttatgtatcatttgaaagaaagttattttgcattagtaaagttttggagagctggtggctctgactagtgagggatggtggtgggtagagtcacagcagattgttttagtagctgttagataaaactggtttcaggttacaacaggaagcttcagcagttgagcttgtgaaaaatgtaattcttggagcaggtgccatgtgcctcaagtaattttcccccccgggcccttcaatttggatttagtcaggtgtaataggaatggcccaatttgcataatcttctttcttatggctcccttttgatcaagatctttctccaaaaccattgctgatcaaccatactgtcttgggaaaagctgtctatcccatgaaaaacatcaatttctcattctggtgtgcagtttgaatgcctctggttatggcatcaggccttttggtgaactttctgtgtggcacatacatcagtcatgagacatgttccttaaaatttgtctactttcagctttagaaatagaacagttcatgttttggtaattttatgagggaaagttggattagaggaacccagaagaatttaggtctatactagtctataggtaaatagcaagaactcaaacacaatgtagagttatcatttattaagaggcatattataactttactttagaaacacaggttttaaaatttttaacattgatcacgtaagaacctcagatttaaaactttgagactgggaagccaaactgaggcagactttagattttgcttacagttttaaggttcctgtgccaggaaatgacaattttaatgtactcattgtaaggctggtaacccttgaagtcaggcattttgtgcattcttcaaatatgacattttagtcaaagccttggtaatataatcaattatattctgctatagaaagagaatggattttttttttttttttttttttttttttttttttttttagatgtggtctcgctctgtctcccaggctcactctcccaggaatgcagtggcatgatcttggctcactgcaatctctgcctctcaggttcaatcaattcctgtgcctcagcctcccgagtagctgggattacaagtgtgaaccacaatgatcagctaatttttgtatttttttttagtatagatggagttttgccatgttggccaggtgggtcttgagctcctgacctcaggtgatccgcccgccttggcctcccaaagtgctgggattacaggcacgagccattgtgccccgctgaagagaatggattttcattgcacttaggcaaataatcatattgccataagaatactcacaaatagtttttgaattctggaagaatcaagtaaggagaaaacaccaaatgcttttatctttgtttaaaaaagtatactttatcaaattgctgtaaattatagataaagagaaattttttccttaaatctggagaacaaaatatttaagacaagaatcaacaatgttttaaataaaagttataaaaatattatttttttttgagatagagtctcgtttggtcacccaggctgaagtgcagtggcatgatctcagctcattataacctccgcctcctgggttcaaactattctcctgcctcagcctcctgagtaactggaattacaggtgctcaccaccactgttcctctgttgcccaggccagagtgcagtggcacgatctcagctcactgcaagctctgcctcctgggttcacaccattctcctgcctcagcctcccaaataggtgggactacaggtgcccaccaccacgcctggctaattttttgtatttttagtagagatggggtttcactgtgttagccaggatggtcttgatctcctgacgtcgtgatccacccatctcggcctcccaaagtgctgggcgtgagccaccatgcctggccaaaaatatctttatcaattacttaattcatgtaattaatttttgtcctgattgatcttgattactagtttcatgaacccatcaatttatttagtagagatctggacatttttatttagtctattgatcttaaagttaacagaaacctgtatttaagagtatttattagaatcttttccattaatctgattgtaaatgtttttagagaagaattcaaaactgtggatgacaaaaacttagaatagccatagttaaaaatctgacgaaagtttataatcaacaaggaaatttcgttatttctattatatatagcattttaagataaccagaattatgactaagacatatttctataaatttgtttatacttttttctttttttctcatctgatatttttataaatttacagaattttcagaactttcatatcaacaacataccaataaatgcaactaaaagaagatctagtatcacttatcatttgacaatgttttttgtatgatttaccaaataacagtaatcatttaatatccccatctacaagatgagaggtatatctcttgagactttccagggaccaaattagaaaaatcccaaggttaattctaggtcatgaagacttaggttaggatttgattttggggaagtttgtcaatgatgtaaaaaacttaaaatatttgattgaaacagaatcacagatcactgaaaaataatagtcattcacttaactaaagcgatagttgaggtttcagaagcaatatagaaagttacatggatgtaaacaccttaacctttttcaatatcagtttttctaagtaatcaaaaacctaataaagacaacacaataaattatcttgataaaatggttttttttttttttggctcagtaaccaaaaagttaaaaagaaaatctgcagaatgactgtttctccttaccagaatctcactaatataacctggaagttgaacctaatgaaaaatatacttgattttaatcctacacaggaagaatatgtccaagattgtgagtatacactatattatagaagaatgtaaacaagaaaactagtaccttgagaaagaaaatacatggctcttagtaacagcatggaaaagcttcctggttacatggtacaattcagacatattgagaaaagccaagagtatagaatcaaattatactggaggaaaacattgcttttctaggcttttaagagaaacacttcagcatcagaccataatagcagaggtagaactggcgggaaaaaaaaaagatgtaagagttgacaaaaaaggttgaaggagagaattatcaccccagccaagcaaaaaatacaccttttcaaggggagaaagttcagaaggcaaggatcttttgctgcaagtcatgtgctgcaaggtacagcagaagttgaacttctgagacaaaaatttgagaaatttcaaaaggaaaactttacctcaaggaatgaattaccattgtaaataaagaggaccatatttttaagccaaaactagggaaattaattagatctcaggaaatgtggcagatactgacactggctgcagtttagaagattgttgttaaaaaaaaacagattttagaattaaaaataaaacccttttgcaattttattaagagcagaccaatacttcaaaaaaactttgttgttctaaatagggggccacatttttttggtttagtattagtgtatttttagtatcaaattttaatctttagaaacatttataaataattcccttctaattataaacaacttgatcatacacaaaatttatttcataacttccccctttatgaacctttttatgacttacttggaccatagttgacatacttgttttttttgcttttttctatacatcctgtttcttaaataactagtcgttttgctttaggacaacaatttaccacataagagtctttctcaaataaattatttttttcatattacttatattttgattaataaacctaaatatatttagtattattataaaattgaagaagccaagaacaaacttatatttatttagcaatttgttggttttttcttatttggatatgaaccggacatttaatgagtacctattatttaatttaccataactttaagattttagattacatgaaaagtttatttataaatgtttattctatttatagtcacctaatctttttaacaattatatctagagtttatatgtataatcatctaattttttttaacaactatatctagagtttactatgaaaattgaggtattagagctagtcattaagttcttttattagccaacttggtagcctgttaatatcaagtgtttacctaagtaagagccttaaagttaaataaatgggtatttggttgataactcacaagctatagctgtttttattgaatcaacaatattaaaataatcttacttatcaaagaattgcacaaaaatcattctgttttaggctgggttcacagctttataaccttaaaggatctaacagaagcaaataaactgtctaatcagttcacccaggcaaaaaatatatgttgacaattttgggacatttctaattttatgttatcaacaattttgaagccaattaatatatccaatatttacttaagtcatgtgaacgaaaaaaatttttgttcattgctgtatattttatatgagtgctcatttatctaaatagaattctttaaggaatttttggccagctatgccagattttgccatgtagacacaacataaaacacaatacatgtacatatgtgtaaacacatctaaacacatatacacacacaccaagatcttacagcatcagcagtaagcaaataactgtggaaatgactttaaataggcgtagttaaaaacagaattgacaagaaaatttggttatttctgtggtttacaataacttaacataataactatgattgatagcatatactcagacatattagaattttagaaaccccatataattttggaacatatattaatatcattcactaaaatatagcctgaagaaggttaaacattagtttttattttgacaatgcttctcatgtaacttaacatgtcaaataatcctgttaacctctcttttggatgcttcaggggccctctgtagcacctcaaagttagaggtcagaaaagacaattttgaagctgaaatttgattttgggaagcttatcaaatatgttattaaggtttaaaacacttaatattatgaaatagaatcccaggtcaacataagtcattcatttagccaaaatgatgactcaaaaatataaaaggcataaacctttactcattgatggagggaagacttagctttccaaacaatctgtctcgtctttcccttctttttttggtagtttattcaaaaggcaaacaaaaatgtttcatttttaaaaatatagcataaaaatcttgttcaagagagaaagccaattttagcattgcattagtgcattattgatgtcaaaccccattcttaataaaaccttatagacaaatatgttcaattttaatgtctgactataagataagattctcataagtcttttttataaccctttaccatttttgttaaagagcagatcagtgctctaaggaaactgttgtggttttattccaatgttcaatttacagaaaaaactgagtaatacccctttaaatttagccaatatgttcatacatagaatctctgttacaattaatttttcacaactgtttcacaacttgttcaaacctttagctttatcctaatttaaaacaatactttaaccctctaaactaggcaaaaatttacatttccatgccttgttataatcttttagtaaaagcacattttgctttcctcatacactttgcatgtacaactttttttagtagtcttaattacatgttacaatgttaattcttagcaatattaatttttggtgaaaaccctgttaagtaagtgattttaattacgtactaggtttggagcctaggacaccagacagaagtacagataaggtctgacccttttcagcatagctaggggagtggttaattccacatgtccttaggtctgacctagctgttaagcaggcaagttgaacaattttcaaaagccaaagaagcagtttatgaccttaaagcatttagtaaacctaatatctgacctacctaatttatttacttattttattttattattattttttttgagatggagtcttgctctgccgcccaggctggagtgcagtgttgcgatcctggctcactgcaacctccacctcccgggctcaagcaattctcctgcctcagcctcctgagtagctgggattacaagcatgtgccaccatgtccggctaatttttgtatttttagtagagatggggctttaccgcgttggccaggctggtcttgaactcctgactccagggatctgcctgccttggcttcccaaagtgctgtgattatgagcatgagccactgcacccagcctgacctacctaatttagaccaaatgtctttattttaccagtaatctttaaaactgtttttatttctcagagattactaaagtcacgtgaactacaaggcattacagttttttctttcaaaatattttatttaagccttatttttctttaagccaattacttagagttcatttatataaacatcacacacacgacacatatataactacacagatagaaaaagatccactagttgtaagatttttcatttgccagtttttaagtttcttaattagattactggcttcagggtggggtccttcaaggagcagggccaggaaaggatgcggtttctaggacctaataaggaggcacaactgaatgacaaaaacagatctccaaaattaagggtcccatttttatattacatcccagatccctaaaaagaggaaaatgctatagaagacagtgcaatgcttttaccatgcatttaattgcatggcaacccaaagccaatcagcccattttgcaatcagcctgtcccccgtgagagtcaattaatttgactcctagtagggggtggggatttttccgtaccttctaggtggccaagagcatgcttctctgattcaagcatggttagtatccccccataactgccattaaccatctctaaaagtatatttcctacctagttattacacacgaaagttctcttataatgcaagtaatttttgatacccccaaaactgaaaaccttcagataacacaatgcaaaatctatttactttcaattcctggggtttcatgaggaaaatcgagattttttcccaaaaccgggtctatggcacttcctctgtttttcctaaggagtcccagactattggaagttatcttaggtcttctcatgtgtgcattaagtgtggcaagaagacaaaatggagaaaaacaattcagttgactgagaagaaaaaacaaacaaacctattttcttcagaaaaataagatccaagaagggaataaaaacccataaaggccatttaaatatacatatagcttggatatatgtatccaagtcagctttaattaaactgacttttaaccacagcactcacaaaaatgttcttttaatttctcattactctagtttagccagggcaaacagccaatatatctggcttttaaactttaccgtaagtaactctacgagtgaaaccaacaaacctcaactaaggttatgacttaaccatgagtgtatgaggtattttcaatttttacaaaattaagaatcttcaaaggtagctcagagaaaggaaaatttaagaagggaagccagaagttgttaatggaggggaagggaatcaacaaacggtaaaggtcacagagatgtccaccagaatgtactcattctgtaagctaggatagaacccaggctgccattataaaatggcaaacccttagctgctgagctaaaacattgggcagtttccactgcttttcccacaaagagtctagagcaatcaattttgagcttgcaatggcttttaactactcaaaataatttttagagctaactatgatatgagccccaaaattccttttccctagatggcagagaccaagagaaagtactgccacactgttacaaggtcaagctcccaaggacataaaacaagatggagacctcattcagttttctgcttgtttcaggaatctgtagcaaagtttgtaaccataggcaaaagcctctcaattttgcaagttgccacccaactagctgcatggaggacccaaattaatgttttccattctggccagagaaaaatacatgtgacaaaacatagacattagccactctgcttagcacccactatcgaacttgtgaggctcaaacttgcccccagttggtccctatcatctttaatacattcaaagtggattaaaggagtttcaacatgtgatctttgggcaagatggacgcccttttaacagaaaagaaagggaaagaagagaaagggagaaaagcattgcctgtggcagagtggggaagatgaggagctcagggaggccagagaaagacccacccattgcagggatgctgaatcaaaagttcaggcggctgattgttggtcgtgaaggatcttttcgagcagtcccatcagctcccaaattttcccctttggggagaaaaagttccccacgttctatggcctggtacacgcctaatcctatcacccactggtgttagcaaagagtgcaaggcagatcactccaaagagaatagtggttaaccccatggtgccaaatccacgtttaacaaagagggactttactgagggggaaggcctccaacccaatcccatcctttaccaggtaaaatgaacccactactcacccaaagtcagcccattggtgctgcggtctatttcctttggatcgggatcgtaactaagctaaaaggctagcagatttaattttttaagtcaatgagtcgcataagctttcgatttgccttttgtaaagtctttaaataaaaatactgaaatctttttagaagcttctgcatatcaatagacatccctagatgagactaacttgggagccctcattttcaaatgcacttcagtgcagttttgttcatttggaacattccactctaagttatctttagtaagatttcaccatttctataagactgctgcttccggggcctaccacttatgcaggtattagccagaaggaactcagttcttcagaaattaaggatccaggccgggcgcggtggctcatgcttgtaatcccagcactttgggaggcgaggtgggtggatcacgaggtcaggagatcgagaccatcctggctaacacggtgaaaccccgtctctactaaaaatacaaaaaaaattagccgggcgtggtggcgggtgcttgtagtcccagctacttgggaggctgaggcaggagaatggcgtgaacccgggaggcggagcttgcagtgagccgagatcacgccactgcacttcagcctgggcgacagagcgagactccgtctcaaattaaagaaaaaaaagaaattaaggattcaatttttacctcagattttggctttgctctcaggttcctttgatcaacctagccaatgatttttctcctaccaaagtgcataagaaaaatgaaacaaggccgggtgcagtggctcacacttgttatcccagctctttgggaggccgaggcgggtggatcacctgaggtcaggagttcaagaccagcctggccaacatggtgaaaccccatctctactaaaaatacaaaaaattagcagggcgtggtggtagacgcctgtaatcccagctcctcaggaggctgaggcaggagaatcacttgaatctgggaggcagagagtgcagtgagctgagattgcgccactgcactccagcctgggcaacaaggtgagactgtctcaaaaaaaaaaaaaaaaaaagaaaaagaaacaaaggggtaaaacacaaaaatccctgtgaattttcaatagcctaattttacacccctgcaatattaccatttactacgtttctttctgacccagtcagatgtaagaggcctctaactgtatccaagccagttaattaccagatcaaatccattccttgaaccagcccagtttctgtcatgacttccaaacccagtttggaacagaaatttgctcaaagaaactcggagagctcaaaacacaaatcagtggagctctgacattggagagaaaacttaccatgacttccaactgctctgagagatcaacgaacacaaataggtcctgcaggtacctggcttcagtcactcagcactcctgggagtcgttagaagctctacttcagatctgctctgacaccatctgataaaagaaaaacttcagctgaattaaatttaaaggagcttaagtgagcaggcaatgaatgattcgcgaactgggcagccttctgagccagagtaggctcagagactccagcacagccacgtgatggaggaagatttatggacagagaaaggaaagtgaggtacagaaaacggaggtgaggtacagaaatagctgattggttacagcttggtgttcaccttatttgaacagggttcaaacagttggctacatttgattggccaaaactcattgattagcacaagtgtagactacagtctgtttacacctccacttgttatagttcatgatgtacagaaaaacctttaggctgaacttaaaatatgtaaggaggcagatttaggctaaattgatttattttttattatatttttaagacggagtctcactctgtcactcaggctggagtgcagtggcgtgatctcggctcatcacaacctccatctcctgggtttaagcgattctcctgcctcagcctcccaagtaggtgggactacaggtgtgtgccaccattcctggctattttttgtatttttagtagagatggggtttcaccatgttggccaagctggtttcaaactcctggcctcaggtaatccacctgccttagcctcccaaagtgctgggattagaggtgtgagccaccgcacccggccggctaaacttgatttaacagtacctttggggagataatttttttgtataatggaatagttactctaattataagctgctattatacctcatttggatctgggaattttctcatgtgatgtatgtacacacacacacacacacacacacgactaatattgcaatattcttttttgtctatgtttgtgtgtccttgtagaactttctatagcccagtctggaagtgtagggaaactgtatctgtttcagagtgaaactgctctaggggatgggaaattttgagtttattatttccatgagaaaatggaatggggcttcttttgggggaagatttaaaattatctgtggaaaaaagtgagttggacttggtaatgtaagatgagaaatttttcattattatattcaatgagatagacacaaatactggtttccttaatatttctgaaattgtatcattgactatgatagatgagactactgttcaaacatattcactcttctacctctccatttcactggaagagtgtagttactggttctattaatgttgggcatggctctgacttgctttggcctcagggtaggtgggggacagttctttgcctctcgactgtgctcagccatgtagcttgctttggtcaatggatgttagcagatgtgactcacggaggaatggaaattaccttgcatagctgggcttgtcctcttgaactgctgccatctccatgcataacacttctttgaactccttcagcctgagccccagatggaatatcagtggagaagtttaaatctcagtgaggagccaagtccagttggactcatagcttgaaacagagctgccccattgagctcgcctaggtcagctagccccagctgacctgcagtcatgtcaattgtatgtcactaagattttgtggctcttttttactcagctttagctaactaatatatcaccatatcagggaattttggtaggacaacatagctaagcacaatttgagatggggaatagaatagggtaaattctctgttcaaagcatatggtaatctggtgcctattttacttattatcccatttgtgcccttttttataacatgtctttggaagcgaaactgtacatccagtgtctctgtaacactgagtctattgtccatgtaacattcagtctactgaactgctttaaaatattagttgaatgacagtagactgaacgaatctctgtagttccagaaggcagggagaaggattgggagagtcgacacaaagtgtgcagccagggctgcgttggtatttttcctctgatgtgctccacagaatggcagctgacccactgtgggttgataatttcactggttcacagaagacagggaatataggactttagggaaataatgtgcctttgtctttgtctttctcttattctctatcaagggggaaaatgctgctctgggctggttggattcaagctcatggattggaccatgggataaagttttagtggcagatggctacttccttgaaatagagtggagaaaaagggtggcagcattggtgagaagggacaggcaggaggcagtagggaagtccagctttactctggagagaagaagaggtgggggtggggagggcagggccagctgtttggggtgggaggcagggaaggtgttggctgcccagttgacatctcttatctctttcctggggccagagtaggttattttacagcccagcctctttatggcctcagcagagaagcaaaggcaaacaaagaacaggtgatccctcagggcccaaggagacgcctcctacagcaggtgtgcccacttcagcagccctgctggccagaatctctacttagaaggcttctcggaaggccaggcccttatcggcttccgactttgaagtcctaggaaccctccctcacacctcccttctatgtggctttgaaaatactttgatattctatccctatcccttaattatttgaaccctcaccagtttgtaatgagcctgaacccatctttgctccattttacatatgacaaaactgaggctggaagcgttgttgccaagcttctttgccctttgtaccatgggatttaattacatatattttatggattctttcctttataaagttgtaatcattcattcttttttaatagagagaaatttagaaaaggaaacaaagcaaaaaatgacctaaaatcctatgggtcagataactcccgttgatattctttccttctttcccccagttctatttccagaggttaccactttcaatttttatttctgtttcattctataaagatgaagaaaatttttgacacctttaaaaatataatttaaatcatcttaaacttatagaaaagttgaaagtgaggataaagaacattaatttttctacgccatttgagagcatgatcccggcaatttgcatgaacaccttgctaccgcctcatctgcaggctccactaaagtttcatcagctgtcccaagatacacaggtttcattctcctgtctctggtctccttcaatctggaatggttctcccttctttccttgacttccatggccttatgtttccagatgacaggccagttattctgtagtgtgtccctcacctgggttgaggctgatgcttcttcagggttggattcacttgcatgcaccttcagcaggaagatcacagaagctgtgctgcgttttccttgcatcctgtcatgtggtgagtaatttcactctaggattagagatggtgttcgctatgatcatttgattacagaggtgactgccagccttctccactgtaaggtgactcttctctttgtaataaacaaatattttgtgatgaggcacactgaaaccatgaatatattccattcctcatcaaactgtcactttactccatcatttagttatattgaaatggactcagatttttattttattcagtaggttattatccatcatcattattatttactttgatgctcacatggtcgaagatttggccatcaagggccccttcaagccaggttctgggcttttctggcctgcacccttcattcttagagtacttcattactttctagctcccaagatctttcaggtttatcttgggctttcccagcccttgccctggaatcagccattttccgaaggagacttggattcttttaatggagaatggcatttagaagtcaatatatgggtgctaggagtgttcattgctattggggtatcactgctcctagactctctcagtggacagagcaaggatatatatgcacacacactattagatcaatatttatctctctatatagaaaaccatgagctcacttcaatactttcaattctaatcaaaaccacagggcttattctgggtttccctccttccatattcatgactgccttctccatgagtgagaaaactggctcccaactttgctcagttggtccccctgcatatacccaatcttccatagcagaactctgcccctccactcattctgtgtggctctgacatccacacttggttgtccccttctgccatgtggactttcatttgacagtacttggactctaacaccctgtgctaggccaccgtgcccctgcctccctgcatggccactctttgtcctattctggctctgacatgccatgccaggctcccccacgccagatgggtgccatctggtacatatcccgtgtgcttagcttagactacccgggctatgatggctactgtcccacccatgcccatgtgctgcatgcatcttatgaaggcatctggtttattctccctgctcatcagttcaatcagcatgtgctaccagtgtagtgcaccagcataccatctgtggatctgtgggatgttcagaagatcaaggtctctgtagaccacactataacagaaagctggaaaacgaacatgatctgggagaagacactgactttgtacttctatccttgccaggtgaaagcaaacttctgctggttcttaccgatatagatggggagaaaacacaagctgagtcaatagctacatattaagtgctgagagtggttaagttgttctatgttgcatttagaaaagcagctaaaattggagttactgcctgattaaatttacgacgacatacagtcattctccaagattcagcaacttcctgcacaggctaaagagctaaagaggtgagccaagtgggcagaaatgtgacaggcctccctgtccctgcatctttcatgtctttaatcatggcatcgatccctgtaattcccctagaaatacagaaatgcaggtttactatttgcgtagggaaagaaaatcccaggctcctgggcctgttcaaccatttctttgacctcatctctccttgcttgattttataccagttgtgctggagtaccttctaatatggtttggctctgtgtccccacccaaatctcatctctaattgtcatctccacatgccgagggaggtacctggtgggaggtaatcggattatgggggcagtttacctcatgctgttctcatgatggtaagtttccacgagatctgatggtttaaaagtgtttgggagtccctagcctctctcctgccgccatgtaagatgtaccttgcttccccctctgccatggttgtaagttttctgaggcctccccagccatgtggaactgcgagtcaattaaagctgttttgtttataaatcacccagtcttaggtagttctttatagcagtgtgaaaatggactaatacacttccttaatgaactctctcagaaaggattcaggaaatgtaagcttgcaagtttagaaatatccttattctacctttacacttgatattatcgctgagataagcgttttaggttcaaaatatatttccaggagtcctaaaaatatagctccatcttttcagagtcttccatcatcctatgttgttgacaagactgagaatggtctctgtctctcctttcctttgtaggcaacctttctcttcctgctcccacccatggaacattttagaatcttcttttttttttttttttttttttttttggtgttttgaaattttgcagtacctgtctaggtgtggagcagttccccgggcttccttttaatctgtagctctggaatactcttgctattgatgattctatgtgtcgactattttgctcacaccccacccagatgcattctctactgtggttctctgctcttccctgtgccaggggaagctgatggctcctttgctggcagggctccagttgggtttggtcaatgggagggactgacaggagactggaagtggaaggagagagaggttggtagaattcttttctacttccccttgcttccatgctgtctggaggcggtggcatgcctccacactacagaagctcccactgggggcccttcctctgcagtcctctggctgtggtaatgtggttttctccttttgttcttttaactgtagggtggtgattgcttctgtcttctgccagtctctgggtgcctcaccatttcttgtttctttcctttaacgcttcccacacctctgtaagttacctttttattaaaatccctttgtttgacaatctgggggtgaattatgtgtcctgtgcagactatgactgatatgctgcctttcattgtcttgatttttccttcctggaaattttagtaattggatgatgggtcattagtgttaatcatccatgtctcttattttagctctgaagttttccatctttctgtgtttttgctctacattatgggatatttcctaagctggttctcccatcccttctaatgatgtgttttcaaatttcagtagtcatgcttagttttcaaggattctttcttgctttcttagtctgtcttatttcacggcaatctgctcttgttatatggattcagtaatttctctaatttaggcattaaaggaagttttggtctcttaaagttattttctattccctaagttatttcagcttcttttggggtcagttattttgtttattcatcttgacctatctcctttgtgctgttgattttctaaatgtgtgaggatctttggttctctgttataagtactggaaaataaactggtttccccggatagctgatgtggcttccctctgctatagccttccatgaaaaaagtaggacagcttccgggagctagctatatgtgagtggaccatgcttggcagctgcccttcagaatgcacaggttgcgggcagggatggccaaggacatttctcagggagctgtgtgtatgggatgggtctctgagaatggagagcttgatgagttcaggccgtggaagcaacatctacacaagcctggatctgagaaactcaaccatactccctgaaaatggagagtttacatgcagaatgagtctgggggaggcagcactagaagggctgaaagaggaagagagtcagactgatttcagagggacccatcctagagggaccactgccatgactccatggggacatttccaaggggagccacaggaggtttcactggagagttgtgtatgtctgtccagtgtctaggaggtgctcaccatggctgagcttgcagggcctcttaggactgtccaggtgagatgtgtgggtcgtgatgagggtttggagaggtttccagctagaattggtcgggacagcccattagctctggggcagaggctcagggaggtgggcaagcatgcaggacacaggaatgcttatagccacagctctgcagggtgtttcttgcccataactgtgtggagagccattctcatctcaactcatttcttgccacaacatctcccgaagcaaactttgttattagctccgctttgcagatgagaatctggggcaatgcgagacggcttctgtgcccggcttgtgaccagtcaccacactgactctcaatgtggtgtaagcaactgtgaatgggcctgattccaaatcccagcaaatttacagtaaggagggtgcctggggtctatccatcccctgactagctgatcttcagcttcctcataggaccagggggaatactgagcatgcagtggactgaggttcagagaggtaatgtggagcgctgcacacacctgagggagttgtgcgcctgtctgacttccgggtgattcatgaggaacattcctgatggggtgggaagggaacctgtcactaagctatttaggagaatcagtctccagcaggtcacaccagccagccacttttatggcagaaggaaaatcctacctagccccttccccagagatggcagaatgcagcctggctgactggcagagcctctcaggctgtgctccggaccctggactccagcaagggggaagaacagcagctcccagttctttcttacagactgctttcttgaggagcttcaagtgctctggctatgattggtgcagggctctgctgcctccagagggtgctgtctcctttccctagcagaggcaaagggtctggcaggcaactctgggagtattggtttaacctgaaatgtctgctaggaagagctacctacccctctcctgggcattatggtcctgaaggaagagcttggactttggattgaaagtccagccctaccatctacaagttggctggctgagacaagacactctacttctttgaggctcagttttctcgcctgtgagatgggatgatcacaccacaccagttaggcatgaggatggactaagggcaggttcacatgcttctgcctggcatgggagctgtttgctgcttttaccaccatttcagctcttctgctgttctctgacccacaagagctagggttcaggctgcgtgccttgcgcagtagttctcaaatgtgtctatgtggaagcttgcctccaagggcttaccagcaaatccagaccccacacagctgccctgcaagaaggaggtgacagtggctgcgttcttgcctgcacagaggacgggtgtccatagagctcccagctggagttgagcagtttctggtcaagcaatgttctctgattttacatgtctggaagctaccattacaatcaggtcttcttaaatgtcctccctccctccgtcttcctttcttcctttctttctttgtcagatgctgtgtgtggacttgtgctgggatctggaggcggagacaagagctgtgacctagacataggggagtggggaacaaaggtgctcaggcagacaaccaactaggctgctacatctgcctctgcagcagagcatgggagggtggtaggaatttgtcatggcagcagggacatcggagctggggtgcaacagaggagcagccgctttccaggtagtcaagacaggaagcagcatggtccagaaagaagagatgacaggtgccagtctacagcgatggtgagcagaggcctgggggcttggcaggtgggttcgcatcctggatctggctgtttcttagctgagtgactttgggcaagttgctcaaccactgagtgtcactttgcttcatcagcacgatgggaataaaaatgcccacctctcagagctgttgtgatgattaactaaggtagtgtctgcagagtctatgcactacaaacggcagctgccattctagagggaccactgccatgacttcatggggacatttccatggggagccacaggaggttcactggacaggtgtgtatgtccagtgtttaggaggtgctcttgaagcagatctgttactctcaggaggttctctaagcacatatgtgactttgccatgtggggatggggggcagggaattataagctagtgtattcaaaacaggagcagcccttgtaagcaaagctgttccattatagccaagtcatgtgcatctcagctccaaaggagaaagtgaccattctcattgaattctcatcgccacaaccttgggactgcctgagataagacactccacttccagggcccaccctgagttttcactcacaccctggatgcccatctccttccctcaccctggctgacattctcagccacactgccctcccctggtctccaggggctgaatgctcccagcctcagggcttttgccgtggctgtgccatccatctggcctatcgaacccatttgctcacagcatctcaccccctgtaataatttatttccctctttccttgtaccctgtctgtcttctcccccagggctgagagctccagaaggaaccaaggacagggagcctgtcttgtccagctctggtgcccagcaggagagccaggctcataggaggtctgcaagtaatgtttctggacgaacttatgaaaggcaggtctttttatacccatttcatggatgaggaaactgaggcagagagagagagagacaggcagacgcacacacccctagacagagagaaacactcctggagaaagagaaagggagggagagagggagggggagggagggagagagagagagagagagagagagaaagaaagaaagaaagaaagaaagaaagaaagaaagaaagaaagaaagaaagaaagagagagagaaagacagcgcagctccagcctgcctgtatccagggttgaggtgggcgtgagagacacacgcaggcagggctgcagttccgggcaggccttgggggctcaagatgcggctccccagggcgagtgctggggtcccggggcaggcgggcggctggagcgctctcgtgggcgggcgcaaggggcaggctgggcgggcgcaggcgggagcgtagcagccgctccactccgcacgcaggcagcatcggggcagcaggagcaggtgaagcaggcgcggctctgccccgcgcctggtgccccctgggcacaggagtgcggccgggggcggggccgagtgggccccggtacgaaccctccgggaagccgggcgcgctgcctgcccttggcccggggcgcagagcgtcacactggatctggggagcatcctacccccactgtggacctcagtctcctcacctgagacatgggcggccccatccgcaccctgtaagccgcaagccaaggaggtaaggggtgcatctgaggtgtctgggcgctatgggcattaggatatagtagcttttgctgagatttcaggagacaaagcaaagggccttccctattctaaccccactgggagattagcattttgtgtatgattcattaattttcctctgattgactgggaaggcaggctgcagggggtccctgttggggcttgcagctggttctagtttttgtatctggagagctgcctggggacaaaatgcagagacaccattttattgaccttgcgtaataatctaccctccccctcatacactcgccacccccttgggtgtgcctgagggacttgaggtcccctggtcctcactggtcagtgtaccccaagcccagcagccccaggcagatgcccaacaccaccttttcagtgctcctcctcctcctgtcttggccctctctgccaatccattttctatatccaagtgatcttactggaatggacctgaccttgctggtctggcccaccactccagcttcatcatctgccaccctggaacctcttattctgcttacttttcccagcaggctctgctccttcctgcctctgtgcctttgcacatgctgttccttgcacttcgagttccctcctctccctgtccctttggctggttgactcctcttcagcctttgagccctgtaccattgccacctcttctctcacctccctgctccctgctccttctctgatctctcaactcacaggcctctctttcatattggtgttggcaatggcaatgagttccatctgcattcgtgctggtcagcccctctgctctgggagggccatgactgtataagtcatctttgcagcccttgtttctagcccagggcttgacacacacttattgagtgggtgaatgaagcagtgagcattttctggagccctcccagcccagtccttccactctgatcctgctttaggtggttggtttgggatgaatggtgtttctccacaccactggccaagccttgctgatggtcacccagagccttgggttctggcccatttgctgcttctgagtgcagtgcctctgccacaggttcatgcagctgggactgctctttatcttatattgggccctgtgtttggctctggaatagtttattttgccatgttcagccccaaatggccctttttgccagaagaccatagtgctggagaaatcttcctgccttcgagatctggttcctaaataaccagactgtaaactatcaggtgaattcacagcttgatcttttaaatgaccaaatgagactcttttttttttttttttttgagacagagtctcgctctgttgcccaggctggagtgcagtggtgcactctctgctgactgcaacctccgcctcccaggttcaagtgattctcctgcttcagcctcccatgtagctgggactacaggcatgcaccaccacacttggctaatttttgtattttcagcggagacggggtttcaccatgttgaccaggcaggtgttgaagtcctgacctcagaaactcatctttataagtagatcagatgcacagcgagtgacattcatgacagccgacaaatagagtttactgagctctggttgattttggccttgtgctctgcaaaaactgccttaacatagcaattgatcatgtaaaaaatacatatggccatgatatgagacttaaagaatatctcgaatagggttttctgctatagtgttttacaagatggggtccaagggccatgtgcatcagaatcacatagtctacttgttaaatacagattcctggcccccatcctggattcacttaactacatctcctggtggaagggccctgggatctgcactttcaacatgcttctagaatgattctgatgtttactgaaggttgagaactgcaaccctgtgggattaataatgactagagaatctgagaggtgagtcacaatgatgtatgtagtggtatggtgcttcccatgcaaaacatccatcattggcactaacacgggggaactctggagtctaaattccaactcagtcttggcagggggtccgttgtgctgaggaggtcctcggagaagggacagcctgtaccagggcatagagatgtggaagagtctggtgtgcttgtgagctgcacactgcatcaagtgacttgaacatagtcatggagtaggttctgtggagggcactgggcacctgtgactttggccaggtatgtctgtgcacatggtgggtagtaggaagaagctggtgtgctgatgagccaggctttgcatactgggcagtcttcagttttgccaggtatcacctaaaaaacaaggctaccagggcagggaggggctgagaccaggagggtgcactgattgtggatccccgaggctttagctctatcttgaagggaatggggtgccgtggaaggacacaagcaatcctgtgcagagtggcatttattgctgtctccattcagataaaatgtgacaaggggcattctacccatgttccctgaacaattccgtcactaaagtctgcatacagcactccaacttttttatcatcagaacagcctcatcctgaggccggagggaattagtagaacaagttctggcattagatgacctgagtttgtaactgggccctgttactaattagctgtgtgactatgggcaagttgctttccatctcagggtcttagattcctcatctatgaaacggattgataatatctacctctaggaataaactagctaatagacgaaagtgctgagcacagtacccagcatgcaacaagtgcttctaacaaggtagcaatcattggatgccaatgtctcaccatgagccttaggtaatagcccctccagataccagccttgggttggaagcagctgagagcctttctacccggccctgctcctctctggattctaccctgggcatgatccctgagtattgtttgtctgtttgccttgtaggcgtcatccctcaagtgtatcacttagttcaagagtcctggaatcttttcacatccactatgaacacctctcacctcctggccttgctgctcccaaaatctccacaaggtgaaaacagaagcaaacccctgggcaccccatacaacttctctgaacattgccaggattccgtggacgtgatggtcttcatcgtcacttcctacagcattgagactgtcgtgggggtcctgggtaacctctgcctgatgtgtgtgactgtgaggcagaaggagaaagccaacgtgaccaacctgcttatcgccaacctggccttctctgacttcctcatgtgcctcctctgccagccgctgaccgccgtctacaccatcatggactactggatctttggagagaccctctgcaagatgtcggccttcatccagtgcatgtcggtgacggtctccatcctctcgctcgtcctcgtggccctggagaggcatcagctcatcatcaacccaacaggctggaagcccagcatctcacaggcctacctggggattgtgctcatctgggtcattgcctgtgtcctctccctgcccttcctggccaacagcatcctggagaatgtcttccacaagaaccactccaaggctctggagttcctggcggataaggtggtctgtaccgagtcctggccactggctcaccaccgcaccatctacaccaccttcctgctcctcttccagtactgcctcccactgggcttcatcctggtctgttatgcacgcatctaccggcgcctgcagaggcaggggcgcgtgtttcacaagggcacctacagcttgcgagctgggcacatgaagcaggtcaatgtggtgctggtggtgatggtggtggcctttgctgtgctctggctgcctctgcatgtgttcaacagcctggaagactggcaccatgaggccatccccatctgccacgggaacctcatcttcttagtgtgccacttgcttgccatggcctccacctgcgtcaacccattcatctatggctttctcaacaccaacttcaagaaggagatcaaggccctggtgctgacttgccagcagagcgcccccctggaggagtcggagcatctgcccctgtccacagtacatacggaagtctccaaagggtccctgaggctaagtggcaggtccaatcccatttaaccaggtctaggtcttctccctgccatgtcccttgccaggctcttccacttagctaagtgggcacactgcaagctggggtggcaccccagcattcctggctttctggggtccagataggctggcaagagctgtttttgcatccatttgcatcgtgaagactggcattttgatacttcagctgtttgttcctgggagaattctgagcacagattccagaggtcacagtaagccttgcagcttgagctgaaagatgccagagccggagatgtctgctggcagcaggcagggttcattctggtgacacagcaacagatgcctggcctgggaacccagggatttcacctccaccagtgagaccacggggccactgtggggtgagggaaggagcgcttggagtcagagctctagaccttggtcaactcttcacctctgtgagagatggtgtgtggaggtgcttcagaagtaaagaattctaggccgggcgcggtggctcacgcctgtaatcccagcactttgggaggccgaggcgggcggatcacgaggtcaggagatcgagaccatcccggctaaaacggtgaaaccccgtctctactaaaaatacaaaaaattagccgggcgtagtggcgggcgcctgtagtcccagctacttgggaggctgaggcaggagaatggcgtgaacccgggaggcggagcttgcagtgagccgagatcccgccactgcactccagcctgggcgacagagcaagactccgtctcaaaaaaaaaaaaaaaaaaaaaaaaaaaaaaaaaaaaaaagaattctgtggatgcaaagcagtgggattactgttagatcattagcgcatccagctgaagacaatagatgcagtagtcttggcttacagccctctgcagcaggaattccaggactcacttcctactccatcccttttctctatcactgtgtcttccaccttacatggaaatcagcctgcaagttcctctcctcgatgagatggcaagcgccttgcaggtgaaatccataccatcatggggcttgtgtcttacatgccatggacaggccctggcacaaggagagagctccagggaagttttccatggtgggttgatggtaaaggtgccactcactgctgaatgtttggtgctggacaggagtccagcatgggaagggggccagggctcaggctcctgcagccatagtctcctgcctgcccttccttgcctcccaggacctcatttgatacagtagctggactgagactctgtggctctccccactgttgacccactacagaggcctccagaactcaaggctatggctgcagcctccttcactctgtgctctgaccactgagctgacttgccccagataatgtgccacgtatctttcaaagcttcctcagggtattgggcatcccagtggccttaagtaggatcaggggcagggagtcctgggagtctaacttcatggggcactggctgaaaaaagcaggtgtccccttcctccagccatccagggaaaaaggagaaagggctccaatgagtgtgaatatcttaccttgggggttatggcctagtcctctggatgctgaaccaggcccaaggcttcatctatgtgtggaccagacagcctgtccttacagggaaagaaatgtcaagactgctcctgggctgcattggatgggatgtctccgcatggttctgttggctcagactgaccctccagcagagtggacagtggctggcctactatagcctcccagggcagggtattcatgtgctagagccctggaagagcctcatcataagccagcataggttctgcaaagggggtctggcatagggctctcacccctgaccaagaaccggtggaactgacgcccaagacaagtgctctttgagccagcagctcccttcctggagctgtttgtcttatcgcttcttttggtcacatctcccattcagttcctttgttcatttttgtgttggattttgggcagatttcttgagccattctcttggacacagcttgtgcttgtcctgtggtgccatctgctgctggctgctccaggtgaccacctgccagcgaagcccaggctccgggacccatctattttgtgaaaagcccacatgcacaaagcaacccccaaatgccaaaggagccaagagaccaaagaaggaagcagacaaatccagtttgttggtattgagtgatttattgagggaacttttaagcaggcgggtggtctcgggtggccacaagacaggcagatctctgcactgttactctcggacccaaggcttatataccaagggaaaaggatatacatgctccagcaagacagtgaaaggtagtgtgccagagcaggcaagaacgccatgtgcatcatagcccagaatttgcatgataacatcaagcttgctttgatctaaaagcaggagtacatattcttacactcgggacagtaaataaagtaggagtcaggaggcattcatgggactggggctaatcagaagtcaacatgggaaaattagcatccaagatggagtcacttttgtcttcccatcaccccagaaagatgtcattgttcaagcttcccaaagaattgggggcctcaggccccccctggatcccacgcaagtgcctggagttgcttctcattattagtctcgatggtgccaagatgctggggacaaagatgatttcaggtgcagacatgcttgaggatggagggccaggctaggcctctggggaaagtgtttggtgctaagaattggggtagtgggtagaagcctcgttgagtgtgttctgtgccccagcatcacctggagcttgtagatattcagagtccttgttgccagcccagctcgattgaatccaaatccatgttttatcaggatcccaggttaattgtgtgcacattaaagtttgagaagctctgctctaagaaacaggttgccctggagcctagagacactgggtaagcacctgtagacacccatcctagttctgggaacgtctctaaaattgttattgctgaaaaggtgcattcagttttggttgtctgtctcatctctggctgcatgtggtcatattttttgtgaggctttttcattcttttgataaatatttgccatgtgcatagtttgcatagatatgttcttagtgaacatggctttttgtattctgctctatttcacttaaaactgtatcatcaacagtttttcatcttgctggatatcttttttttttttttttttttttgagaaggagtttcactcatgctgcccaggctggagtgcaatggcacgatcttggctcactacagcttctgcctcccggattcaagcaattctcctgcctcagtctcctgtgtaactgggattacaggtgcctgccaccacacccagctattttttttttttttttttgtatttttagtagagatggggtttcactatattggccaggctggtctcgaactcctgacctcaggtgatccgctctgctctgacttccaaagtgctgggattacaggcatgagccaccgtgcccggcctagatatcatttttgatggccgcttacaagtgtacaaactgccccagtgaaagccagtacccctcagtatctctagctcctgggggtggtggggggggtgggagggcatctctagccagcaagtggaccctctgccacccattgtgggaggaacccaccttacagaggaggatcatggctggaattggagactcataccacaaagactgactgggaacccttggaagatgcaaaactttatcacgtcctggctgtgagtgctaaaaccttgcctaatgctagcctttcttttttaaagtattgatgtggcctttttttttccattataaaagtaatcatattcattctgaaagatatacaatatatacaaaaataaaattgaaaaaaggaaattatcaggagttccaccactcagacataatcactgtttacattttggggagtcattttaaaagttttcatatgcatagtcatatacatatgtctgttttttaaaaaaatggttgagagcatagtgtgtccacatgggaacttataaatcatatttaaggattgttttatatcttttttgtttaacctgatataaatttttattcacttgtttattcattaaacaaatatgtcagacactatgttagctgcggggatacagtggttgtaatcagacattgtccctgttctatgcaacttagagtccattgatagatatatcctatgtccttaatatcatctgttgtggcattctgagctgtctctagacctgttgcatagagttttatgatgaacgtctatgcaaagaaccttttctatatttggaattatttccttaggagagatttccagaagtggaattaacaaagggcatggacagttttcaaggctcttgacgtgtgctgcaaagttgatttccaaaaaaggtctggaacaatttcagggcactccctgaagagtgcccatttcaccgtaccctggccactgttggtgatttaccattaaccaaaagactttgacctgtatcgcccagactggagggtgtcccagctcctgcctccaggtccagcaaacactgtgggcactgaccattcaaggctagcctgaccctgtccctctgtgaaacctttgggggttccacaaagcctttagggttgcaggaccacataacttatccaaacagggatacttgagcatgaaaggggccaccatgaataatcaccctgggacaacaggcaaaactaccctgggaaatgggaacatgagatcatcctactatagataaatctgatccctttaacatagcttaaattcaaccctctccaccatctggccccaacttaccttttcagtctctttgcatcctgacatatcacacgatccagtcacagtcggcctgcaattaccaaccatgccttgggtgtcactgtctctgtacatctgctcccgccattccctcctcctgcctccagccaccccaccccccgccagtctgcaatgcgccccctcgcccatctgtgtaggtccaaatcccacccttgcttcaaaacacaaattaaatggtaccattcaatactgctttcattcaacaaacatgtactgactgcttacgatgtgtcaggcacatagagtacaagaccgaaaacatcccacctcctgtggaactttgatttgtgtgtgcaactgtgacaactggtcctaaagatgaacacaaaatgatgtgccagagagtctgccctgttatggttttgaatagacacacccaccaccccacaaggttatgagctctttgagggtaaaatccaagaggctcatcctccacccttgcaaaacctctgacacacccttggatagagcaggcacttaagcatttgccaagtgaagaattaatattaaagaagcttacctattcactccgcaagagttttctaataaccagttctgggttctccatgaatctgagatcaaaggggagcctaaatttccacataccttagagaaacacccccaggtcctaccactgtgactctctgtccaccctgatactggaagaaactgaagtcaccggattcactgattgctgcttcttgtgaggttaagtgactcatccaaggtcacacagctagatagtgactgagccactggaggggtcaggaggtgatacaggaaagaatcagaatgcatgagtggataagtcaccaaaggagtcactggagtggaggggcctggaggggaaggtgaccctgagtgctggaatggccagagaagaacaaacaagctaacagccccaaagacctccattgtccccagatcccattcactgtcatctcctgaagaacatcactctcacaccatcagtgttctctgctcctttttgcacaaaactcctccagagacttgtctagcctctttctctctctttttttttttttttttttgttcttttagagacagggtcttgctctgtcacccaggctggaatgcagtggcacgaacatagctcactgcaactcgaactcctgggctcaagtgatcatctcacctcagcctcttgaatagctagcaccacaggtgcataccaccatgtccagctaattaaaaaattaaatcttttttttttctttttttgatagagactgggtctccctatgttgtccaggctggttttccttttttcttccttttttgtagagatgaggtctctctctgttgcccaggctggtcttgaactcctggcctcaagtgatccttctgtctcggcctcccaaagtgctaggattggcatgggatactgtgcctggccccctgtctaatcctgaagcttccacttcctctcctcttaggtgctcaccagtccattcatatagctcttgccatgttgccaaatcctgtggccagttctcagtcttgtctgatatggtcgtcagctgtattgggtagttggtcactcccttctccttgagactcctgcatgtggctttttcagggcataatggtcatggttctccctgcctcattgggctcttcttccccatctcttttcttggactcttgttgccctgattttgggacactggagcatccccaaggagccctggaggtcctctcattcccctggtgagctcacccagttttctggtgctaaatgccacaaatactctaatgttccccagtgtatctccagtctgaacttctccctgacctccagatttgggtgtccaggcatgctttgtgtttcctagacaccagtcagcatctcaagcttggcacattcaaaagcaaactccagatttgtccctgctacctccttcctcagtgtcctccttttcagaaaagggcaagtcctgcttttcatttgcttgggccacagtctttgggatcacctcctattcacacccctcatccaatctatcggtgagttctgtaagctgtgccttcaaaatgttctcagaatgaccacttctcactgcctccaggctctgccttcaggttcaagccaccgtcctccctacggagatcatggcagaggcctcctttctggcctcattcagccagagtgatccactgacactagtcaggtgcctctacaactttgttcaaccctccagtggctttccatcatactcagggcaaatttcacagtcacagtctgcacctgtgtctgcagatcatccgcccctctctggcctcacttcccactacccttcccctcacccactcctcttcagcagtgcttgcttctctgctatcttttgaacaggctaagacctctcccgcctcaggcctttctacttcctactcttgctgcttggaatgccaccccttgatatcaactttctcccttgctcccttcaccttaagtgaacctttattagaagattaatttcctggctgggcatggtggtttgtgcctgtaatcccagcactttgggaggccaaagcaggcagatcacttgagcccaggaatttgagaccagtctagacaacacagtgaaaccccatctctctctacaaaaattacaaaaatcagctgggcatggtggcacaagcctgtattctgagctacttgggaggctgaggtgggaggattgactaagcacagaaggtcaaggctgcagtgagccatgatcacaccgttgcacaccagcctgggcaacagagtgaaagcctgtctcaaaaaacagaagactaattttttaaccatcctgtaaaaatataaccatcctccctctctcttcccttttctgcccagtttctgccacaggacttagcacattggctggttctttgttgagggtctccactccctcattagaacatgaaccccatggaagtaggcactgtagatgttttatttactgtccagctctcagcaagaacaggctgttcacgagaggtgcagaagaaatatccatagtacaagtgaatttccaactgttatagttcatcagtggagagctgcacttcagcctcttatttgtggagagcgggcatctggttttgtagctgtttggtcccaagtttgacagccgttgtctgctgactgaaagggagctgaagcagctccctttgcatcctggtttcctggtttgtaataataaacactggctgccatgtatttagtgccccaaccactgtgccagatgctttatatacattgccttccctcaatcctgagatcagatagatgaagaaactgaagcttatagaggtgaaataattttttccacattttcaataagagccaaagatgaaacccaatcagttgtcttccaaagcctatgacttagactgttgtagcaggaaggacagttggccagatgacctccaagtggccttgaagctcatagctagaaagtatgagctttatgggcaatggagaagcactgaaagcttttaagcagggggatggcatggtcaggttacatggagggagagtagtgtggctggattggcctgcattccccagaaagcagaagctggggcagaggtctatgagcttttcctttattagggagaaagatcccagggaacaagatgaagaatatggggaaggagacagggaaggagggagagtcaatctgaagatgcgctactgagctggcagctgattactcggtatctcttaaaaccatcttaggacagtttgtctggacgaaaaaagaggtaagaactcatccatcggtttccatattcccttggcaaaggttcgtacatggagcattacctccccacactctggggacacacaggaacactgaacatacctggacataaacagagcaggtcctgcagagatgagaaggatgtttggggtgtgaggtgaggcgccatcaggtcgcacctgtgtgaagccagtgagctctctcagagctggtgcctcagtgggtgctggaccaagaggccagtgaggacaagaggatcataagcagagcagaaacagcatccaattcagggtcagaggaggtggtgtgggctgaactgtgtccccccaaactcatatattgaattcctaaccaacggtacctcatcatgtggccttctttggaagcagtgtcattgcaggtataattagttaagatgaggtcatactggaatatagtgggtccctaatccaatcccttggcaaaggttcatacattgagcattgtccgtataagactggtgtccttataagaaggggaaatttggacacagaaacacacacagggaggatgtgttgtgaccatgaaggcagagttcagggtagtccttctacaagccaaggcatgctgaagatggaagtaatccactagaagctgagggacaggcacccaacaggctcctgcacagccttccgaaggaaccaaccctgctgacaccttgaccttgaacttgcagcctccagaactgtgagaccataagtttctgtcgttttagccgctctgcctgtaacgctttgttgtggcaaccccaggaaactaacagaggaggtgagattgggggcagggaggcccatctgtggggggcatcatgtcagtcaggcactcagtaactgggggaaaatcccaaactcaagtgggtgatggcaaaatggggaaattatcggctcatggaatggggctctccaaaggaagttctttgacttcaggcttgattcaagggtttgaacgaggatggtagggctctctagtccttgcccccttgtctccacatgttttgaactgcacgtttgtgtgcctccagaattcctatgttgaaaccctaacccacaatgggatggtatgtggagatggagcctttgagaagtgattagatttagttgaagttatggggattcttcatgacgggattaggcccttaccagaagagaccaaagagcatgctctctctctctctctctctctttctctgtctttctgtctctctctctctctctctctctgccatgtgaagatacatcagggagatgtccatctgcaacccaggaagagagccctcacgaggaaacaagcaggccagtaccccagtctgtaggacttcccagcctccagaacagtgagaaataaatttctgtggtttataagccacccagcttaaggcattttgtcacagcagccagaacagaccaagagaggtgcctgtgtcttgatctctagagagagcattggccaaggccaacccagccatgagagagagacagagagaggcagggctgggctgtggctggctggggtgtggactgatccagagctggcagtgggccagaggaagttcagctccccagggctggatctggtgagaggacatggaggtcagcaaacaagttagggtcctgaggcaccgggtgggggtggggttcagcaaggaggtcttggtggacaggatgtggcagtggcagaggagctagttctccagagctgagaccagagatgataccaggtaagtggcccttcacctgtgctctgtggcctcacttctgtagagaatcgaggccagcttcagggtcaagcttctcggctggaagctgggagttgttgctgtggttcactgagtggcagggatacagtgatgactgagaaaatgctgaagagacctggaagtcccccatagaagaaatctgattcttacagcgctgcggagaggcagtctgggaaggcctttcttcccagagtatctcttcaaggttctgatacacctcacaagccctgcaaatacagacagaccggaatggggctcccaggtccagaggagatattgggaaagggtccgaggagcagagcaagatgtctgcttagccggcagtagccagcactcccggcctgggcagccaaacaggcatctgcaaggggacttgacaatgatcggtggagcaggagggtgcttgagagtgtggctgcttaatcatggccttgaggtttgttgttgtttaaatgtcaccacttatttgaaactaattcctgtcagactgcgaaaagtttatcagtgtaattgggtgccggcaaaaagctctcttaaaatacacatcctttcattcataaagctatcaatggggcatttgattagcatctttttgactgccaaggaaaccatactgaaagcagggcatgcattcagaacaaagaactccagctcgtgggtgaaaactctgcgatagccatatctcccccaccagatagtgtgctttgtgatggctggcagcctgtgccccttggaaatgtcattttcagccccttctgggcttgtgactaaggtgtgggtggtggatctacaaaggatttcccaaaaagaaggcctcctttacataccttttgttctgtggactgacccacttgtcccacccacatacctgcagcaggcgggagagttgtgccttaactgggcagctgtgagcaccagtttttttccccaaattcctgggtgctatctgagcatgctgctatttggcagtggggcctcagtcacatcctgatggagaaaatgtgaaggtttgtcatcagcttatttaacaattcagaggctggagtctattccactttttgtccagtatgtagctttaaaacagttacatataacatggaacagtatgacatgaaaagagagaggtttatagagggagatgggaatcgtgacagcccctgcttacggagtttgcccctccagtcctgaattcttctgcatccccacatcctgcttgtctggaaaacggctgcagcttactacttcgattcttggccttccagaaactggactcctggcccatcttttcatctctttggagaaacaaacaacaaacaataatctcgtcataattaaaattcactgtgatataaagctactctaaaaatagtacaattaaaattaaaatttatttcatttcttgagctgacatttcagacagccaggggcctcccactaaacttgaaggtgatgagtctctgctcagtctcacctcccgggcttctgttccagcatgagtctgagctccattcaactcttcccgggccttttcagctctaggtgtaaaggttcagtgtgaactcgtagaaagaagacaggcttttcagtcaacagatctgaattcttacacgcactgtctcatagtccttggtctcagtttccatgtttgtacagtgaggatcatgggttccaaggatttgggttccaaggtggggttggacaatgaaaccatagctgtccagtgtggtggccatgggccacatgtgacttctgagcacgtgaaatagaactggcacaaattgagatgtgccaagtgtaaattacacattgaatttcaaagacagcccctacaaagaatgtgaagtgtctcattaataattttgtatattgattatatgttgaaatagcaatattttagatatattgggttaaagtatgaaaatcaacatcaatcttttcgttttactctcactattttttagagcagctttatagtcacagtgaaatggagtagaaagaacccaaatgaccactccatctgtcctaagccagtctgagggctttctgtccagccctaacgctgtaccatgatcctcactgtacaaatatggaaactgagaccaaggactatgagacagtccttataagaattcagatctgttgactgaaaagcctgtcttctttctacgagttcacactgaacctttacacctagagctgaaaaggcccaggaagagttgaatggagctcagactcacactggaacagaagtccaggaggtgagactgagcagagactcattaccttcgagtttagtgggaggccactgggctgtctgaaatgtcagctcaagaaatgaaataaattttaattttaattgtactatttttagagtagctttatatcacagtgaattttaattatgacgagattattgtttgttgtttgtttctccaaagagatgaaaagatgggccaggagtccagtttctggaaggccaagaaggacttcccgtatccttcctgggccccaaacatgcacagcctccccgttagctacactgtccactagagtggtgtgtttgttacagttgatgccagactccatggttcggggtttgctcttggtgttgtacattctatggatttggacaaatgcatcatgacacgtaaccaccattatagtatcacacagaatagtttcatggccctaaaaatcctccgtgtcttacctatttatcacctcctttcctgttaaaccctggcaaccaccgatctttttaccatccccgtagttttgccttttccggaaagccatgtagttggaataatactgtaagttgtctttcatattggcttttttcacttaataataagcatttaaagttcctccatttcttttcatggcttgacagctcatttctttttagagctgagtgatattccattgtctggatgtgccaaaatttatttatccactcacctactcgaggacatcttggttgcttccaagttttggcaatgatgaataaagctactgctgtaaacatccatgtgcaggtttttatgtgaacataagctttcaactcctttgggtaaatatcaaggagtacttttgctggattgtatggcaatggtgtgtttagttttgtaagccactgccaaacttcagccgattcctggtttccctattctcggcaggctggcctcacaaagttcgtctcctgcagagctccaaggaagctggttttggctgaatctgaagatgatcaacactggtaggatgctgctgtgtcatagactggaaccccagctcctgatcatgctggagtggggctgctgctccctgcaaccccacctgcctcccccttgagctggaagagaagggctgacggccagagttctgccataccccactacgatcagatcaagctctgatcccaccaggccaggggctgtgcttccttgatcatataagcccaaggtccggggtcgctctcctggagtctgacatcagcccggctaggtcccagtgcgctgctctggaagggtcagaacgcttgttcctgagcttatctctgtggattttccctgatgaactctgatctagcaggcagtgtatgggctgctaagtacttttcccttgtttgctcaaggagtttgcggccccaagatcatttccaaagccttttgcttcagcttgctaaagggaagctgctgtcactctcttcagcttgctaaagggaggcggagttctgaggaaggcaggcaccttaagggatgttgaaagttgcctctgtttgctgtgcctaccacctacttctagtcctcctctcgccgcccagatcatcccctacaatgcattacccatgcctgccccccaccacccagaagctatgggggctctggtccaagccccacacttgtccgaaagaggtgcctgggccccacagaagccttgtcagatgatggcagctctcttctgatagttcaatggatctgccacctacacagagaggtctggaagtcgctaactctctttgagtctcagattccatagtagtcaaatgaagggtttgaaccagaatattttcaagaatttgtgctcttctaagagtccatggtttttttaaaagttaatttaagttttaaaatttattttttattttatttaaacatttttatttattttttaaaatcttttattttaggtttcagggtacatgtgcaggtttgttacataggtaaacttgtgtcatggggatttgttgcacagattatttaatcactcaggtactgagcctagtacccaacagttatttttctgatcctctccctcatcctactctccatactcaagtaggccccagtgtctgtcattcccctctttctgcccatgggctctcatcatttagctcccacttataagtgagaacatgtggtattttgttttctgttcctgtgctaatttgctaaggataatggcctccagctctagcctacactatggaatactatgcagccataaaaaagaacgagatcatgttcctgtaaaggacatgatctcattcttttttatggctgcatagtattccatagtgtatatgtaccacatcttctttatccaatctaccattgatgggcatttaggttgattccatgtctttgctattgtgaatagtgatgcaatgaacatgtgcatgcatgtgtctttatggtagaacgatttatattcctttgcgtatatacccagtagtgggatttctgggttgaatggtagttccgtttttaggtctttgggggaattacctcactgttttccacaatgattgaattaatttacactcccatcaacagtgtataagcattcctttttctctacaaccttaccagcatctgttattttttgagtctatgatttatctttgtgggaaatagagtaattttaaggccctccaacctctccatggaatgaagtagagatctgccagcaaagccagcatcaggaccgagtagaatatccagtacatggcaggtgctgcgtgatttttgttaaaatcataatctcattttaagaggactgtcctacacaggccaagcttgattccatggctcttccagttaatttcctcatctaagttagtattagccatgtccacatctgagctgtgctattaaaagccagaccagcagcctcattgctcccatcgacaggcatatggtactagataaaaagccataaatgtccaaactgttgagaaaaaatgtgagatgagttgagggggacacaggttgccagcctgccactctgggccccgtgctggcctgggtgcagccctgtgtcctgtgttgctgacctgtctcccagtgtcaggcttgggcctccctaggaaaattttccatggggctctgggcctcctcctccctcctgccttgcctgaactggccccacactcaggactggggagtgtcaaagtgtctgagcctgggggaaggaacaaatgcaaagcacgtgaggattcctcctctggggagagtttatcccataagtaatgacatcacggttccccagccttccaggatggcatcctcaaggtcatcttcatcctctcttcctctacaggctctgccactgcagctacaaactgcagcgaaggcccccattaggaaaaatactccccacgactttgccagcccctgttctggaccttcttcccctcagagccaagccccacaagagtgttctacactcctggccaccacactctcactttctctttgcttctcagctgacaggcattttcacttctgtgactgctgaagctgctctgcataaaagcccatctctactaaagataaaaaattagctgaatgtgatggtggacaactgtaatcccagctacttgagaggctgaggcaggagaatcacttgaacccaggaggcggaggttgcagtgagccgagatcgcaccattgcactccagcctgggcactaagagcaaaactctgtctcaaaaaaaaaaaaaaaaaagcacaagtggcatggtcttgccatgcgatttgggtccttgcaatacttgatctttgcagcttcattcttgacatcacctccctgaaatctcctcttcccttagctcccatggcctgactccagctaggtcctctgtccctcatatgccaggctttcctggttctgctgtagcttttgtgtcctgcccccaacaccctccataagcaattgcaactgtgccccgttcccagactcacaccttctccagtctccgtctacctgcaggctggacgcctccacggcgtgttccacacatacctcaagtgcaagtccaaagcaaaatatggtccttctcagattccagctggattttccatcacagttattcctattgtgaaccactgaattgcctagttaggggcatctgattcagacttgttcctttagcttggactatgtcaagaacctccctcaatgacatctctgccaccaggccttttgtccagcgatcctttctctggacaacgtctcacatctgaccttgactctcccactcagcggttcctgccctctgcaggatggggtccccgtgctttcacatggcccctggccattcacagcttccccctggctggccttcctctcctgcttgttccagcaccccctcactcccaccccatgcttgaatccacagactccttatttttgggtcctcacatatgccacactgtgcccagctcaatgccttccgaatctcatgctttccaattccaagtttaccttctctgaaaacttttcctggctcccttgtttcgtgtctgcatccctggattttgcactttgccttgttcctgttgggcacttagggaatcttagagctggaaggatgcaatagagtctccatcttttcacctggctgtaaccccggcaaacaaagggtgtaggttgttatctcctgggcagctggcacagtgcctggcccagaataatgccccctgagagcacagtaaattggtttccaccgtgaagaacagatattggagcttgaaggtgagctagcctccaacaggggaccagggaggtgctaggccagcgagcccaccttccccacgatgcagccaatcaagactccagagggctccagcaacagcatgaaaaaaatagctctccatacaaagcatggaaactagactttagggcctaggggaatggggcttgtctgcctctatgtaagaaagcaggacaggccgggcatggtggctcacacctgtaatcccagcactttgggaggccgaggagggtggatcatgaggtcaggagttcaagacctgcctggccaacatggtgaaacaccgtctctactacaaatacaaaaaattagccaggcgtggtggtgggcgtctgtaatcccagctactcgggaagctgaggcagagaaatgcttgaatttggagggaggaggttgcagtgagccgagatcatgccactgcactccagcttaggcgacagagcgagattccatctcaaaaaaaaaaaaaaagaaaagaaagcaggacagtatattgcaaattaagctcaataaaaagagagaaagagagggagagagagagaaagagggagggaggaagggagggatagtgagaaggaaaggggcagtcaggcagaccatggtcccctgccaattctctgggcaccggtggaagcaagttctgcgtcttgggcacagtactttatcacctgattgtacttcctccacctctccccaggcagaactattgacccagggatctataacatttgtatatatcaacacagaaaccaattaacaaatgcttatattcctgtgcaaatatgcaaacttccttctgcagacaggggtaagcagacacctggcagtatttttagaaatatttaagaaacacagttcaggtaagaagcaggctgctgtaccctcctccgggaggaccagtacctagaaccatctgtttttctttgtcttccctgctctgctctgagcgtggggatggtccttatccttagcttcatctttattaaagctggcattttcggctgggcatggtggctcacgtctgtaatcccagcactttgggaggccaaggtagatggatcacttgaggtcaggagtttgagatcagcctggccaacatggtgaaaccccgtctctgctaaaaatacaaaaattagccaggcgtggtggcatgtgcctcgagtcccagcactcgggaggctgaggcaccaggattgcttgaaccctctgcagtcagccaagattgcgtcacggcactccagcctgggggacagagactctgtctcaaaaaaaggaaaaaaaaacagctggaattttcttcagtgcttacgctgtgccagatacatgcatttactcacttcacaatgagagggaagccactatgtttatcagtgaagcagggtcatttgggaagcattatccaacaccacctactatgggcccagcccatggcaactggaagcagcactactcagaaggaaaggcatgtggagaagctcagagctgacaggggagtctatacttgattgtaagatttctgtacaaaatgcctttctgtgtgctgtatcatgtagtgaaagataagaaacaatagaatgtccagcaatcagagaaggcttgacatgacaggctactttttaacagcactgagaaaagcttgctatctattaaatattttaaaatcaggtgctaagccgcagagtaagcacctcattatttggaaatgcacttatacattcacagaagcaacacccctggaaggaaataccccagtgatcatgggattgtagtaacatttttgtttgtactttttatataccttaaatttaaaattccttatgaataggtgaaaagcctgtccaggaagctttgtagggtcccctgagttcttggtgttctgtcagtggaggctggtttgagtcattcctgtaggagagctacccaaaacaaaacgaaggggaagcaagagatgcaagcttctaagcctctgacaccttttgcaaaattgctttcctgcaaggctgtgctgcttcacctgctcccccaccagctggtgtgagaggcacagggtttggagcagacagctgtgttctgaagggatggcattctgtctggtgacacttagtggcagtccacttttctcccacaggttgctggctgatctagttgccaaggctcctgcgtaggtgttatctccaaacatgcaggcatagttaagagatgagaaatacacgtgtttggacaaaagactggagcacagttcaatcagcctcagcaacattatctctaaaagcaaatgagtcctgctgttgctggggacctacccctctgccttggctggaagtgtttgagtctgtctgaacggtctgttatctccagggcaacataaagtttgcaggaggcctgttcactccaggtgttatcgctgtcgctgagatggtgctaagcctacaggcggcagaaggccaattgctaaggcagagggagcctttagtggggagccaggcagcctggggaccctgggccacagcttccttccctatgacatgcactctcatgcccttcccactcaaacatccagtcattctgcacgtcctggtagagggagatgccaggcgaaccctcggggtaaccccagcacctggaaaaactcctcagtgggtttgctcagtgtcatttaaggatcccaaccttgaaggttttggacttgggatcacacattgtttcattcagagtgttaggataggggtctgtctagttcaggcatctcaagttagagatgagaaaccagactcagaagtctgacggtccttggaggctggccgagagaaagacctgaggctccccgtctccctgcctgggcacctcataccaccttgcttttccctgccccatgtcaagagcaagctggagccgaatttggggctcccagttgggctccaagtgtgatttcctccacacttgatgaccaggaggccatttgtaggaggctgggatgagcaaagtgggtcaaagtgccccctgcctccaaatgctcgcgtggaggttgggcagtcagacaccatgggggagaaaccccaggactttagcagaacaaaagaagggcaccctcccttcctgggccctgccagactcttggcagaaggccagggctactcatggggcggggagtgggggaaggagggaggagcagggatggtctgttccagccctcctgtgttcatcctgagccgagtcactgaggcctgcagcacagctatgacacaacttttggggtgtcctggtaggagggctttgggctgcaggtggggcattggaagcagatttctctctatagtaaggcagtagatccccaggccttgccctctgttcctgaaaatgtgagttgtaccttgaaccacaaaatggctgtggggtgcagcttggtgtgttggaaggagggctttggatgtgggctgcaactgcatcatccttgctcagttctcatgtggcaggtgtgctcctgcctggtctggggcagtctggcaggctgctctgtagccccaagcctggatctgccaaaactggcaaggagtggaggcctccccgtggagcagtgcctgaacctgcagcccctggggcagacactcctggctcctgggcacctcactcaccatggctccccactttcttagttggctcgggccgctattgcagaatgccatacaccacgtggcacgtggacaacataagtttatttcttacagttctggaggctgggaagtccaggatcaagtagctgaaacagatttggtttctggtgagggcctcttactctttcatagatggcgccttcttgctgtgtcctcctatggcagaaggggtgagggatctctccagggtcttttataagggacctaatcacccctgcacaacccagcctcctaatagcatcaccttgaggtttaggatttcagcacatgcactttgggtaaacaccgtcaatctagagcatcctccccccccatcatgctggcttccagactctgctcccaagtgaatgtccacacccaaggggggccctgagtcttccttaagtctctttgtctaggacagactgtgctgaaagggcccatctaatctcctgatatggtttggctgtgtctccatccaaatgtcatcttgaatgatagctcccataattcccacgtgtcgtgggaggggcctggtgggaagtaattgtatcatgggggcaggtctttcccatactgttctcgtgatgctgaataagtctcatgagatctgatgattttataaagagaagttcccctgcacatgctctcttttgcctgccaccatgtaggatgtgactttgctcctcattcaccttccaccatgattgagaggcctctccagccatgtggaactgtgagacgattaaacctttttcttttacccagtcttggatatgtctttattagcagtgtgagaatgagctaatacatctcccaacagcctgggccccacccacccccactcctcaaacctcctcagtctgtccttgtacaggttccttctcctccagccccatctcgcttcatgtgacttctttcttccttaaactctctgcactctctcctgctcccaggattttgtatctgcagtttcctctgcctggaatgtactccacctggtctacaactcccagctagcctggagtggagagcttctatgtcactccctctgggatgctcctgctgacccccaagactggctcaggccctgagttcgaccctcttgtggttcagagaattcctgggcatagccatgccctcacttgtgcttccactgccacatggggttgctggactgttgtccacttcctcaggggcatctgcttcctcagaacagggcctgggcattttgtcacctaggattccagtgccagcacagagagtgggctcagctgcagacactcagcaatgttgactgaatcaggaggcagcaggtgactcgatgttatgggctcacgggaaaacccctctcctcttcagagggccttaccctgaggtggcctcaccccagttgtcttcactgggtatgggtctctttgcccacccgctgctgcctcactaaccttcctggcctcagacaaatctaaactcaagtcaaaaccagggtgaagatgggcctacgtcagctccagagagggacagcctgaattcccctccctctggtcccatttccttgggaggatcagcctcttcctggatgatgacaccagggctcttcaccccctagggaggggtccagcccatgtctgtggctctggtctgggccctgaggggacacacagtaagtggcaaacacagacggaccaggccgagagcaagacaacatcctcaatggttaagatgtataggccagagggaaattgatcaggaaatgaacttagaagtatccagggactgatggggaaggagctgtatttggaggacctgtgatgcaagttacagaatcaaagatgtggcccctggttttgctgtgtcctcctggaatgggtagcaggacaggagccaccatgcagagggtggtcacacactcgggcttgctttaacctgggtctttccttaccaatgcatttctggctacactggggaaaacgaggtggctaacacattttttttaggtgttagaagacctgtgtgcactttctctctttctccctgcactccagccacactggcctttgagtttgtagaatgcctacactctgctctgcctcagggcctttgcatgtactgtgctcactttatggaaagctttgttctcaatctcatccaatctctttaattatttgaatgctatccatccttcaacattcagttcaaatatcatagccagtaaaatctgctgtaataaactctcttagtttcctccaatttttcttcctaatatttatctcagtttgtagtcatgtattcttgcgatggttgggctaatatctgcctcctcactggtgtttaacctctagtaaacactagaggtttaatctctgaggtcacatctctgagggcagagatatgagtgacaggtccagtcttattcccaacatcaaggccagagcctgtcaggcagcaaatgcttagtaagcatttgttgagttgactttgaattgtcagagctagagggtcggtttagcattgacacatgggggacatcatgggagaagccacgttttgttaggacctggccctggggagatttcttaagccaaaggctttgggtctgccacccttccatccaaggagaagtctgaagacagggtcagcattttgtttgtcctccacagttgctaactttttttttattttttgagacagagtctccctttttcacctaggctggagtgcagtggcatgacttcagctcactgcaacctccgcctcccgggttcaggcaattctcctgcctcagccttccgagtagctgagattacaggcatgtgccaccaagcccagctaatttttgtatttttagtagagacagggtttcaccatattggccaggttggtcttgaactcctgaccttgtgatccaccctcctcggcttcccaaagtgctgggataacgggcgtgagccaccgagcctggcccacagttgctaacttttaacacacaggacatttcatgtaaaaattgtgacttgcagcttcttttgaagaatctgaagtcaagcagccctggcctgcatttgtgcatggctacctttgtgggatcttggtcacagctgaccctttgggtgggcatgctactcttcagttagttgggccctcttcactagttttttcactagtttttagcacctgcttgcccctgttagcaggtatggacttttacctgaacactcagattagaaagagatggaaaaaccacatggccttgcagaataagggagatctcatctccatgcaatgaggaatcagtggcaggcctctttgcagaacctccctggaagggaattgctatggttgcatgtgtcccacaaagtttatgtgttggaaacttaatccccaatgcagcagttttgagaggagggagtaatgtacagaaaaatatccagaaatctgtacagttgatatggcttggctctatgtccctacccaaatctcctgttgaattgtggtctttagtgttggaggagaggcctggggggagatgattggatcataggggcagatttcccccttgctgttcttgtgatagtgagtgagttctcatgagattatcactccccctcctgctccaccatgtgaaggatgtgtttgctttctcttccccttcttccatgattttaagttttctgaggcttccccaaccatgcttcctgtacagcctgtggaactgtgagtcaactaaacctctttaactcataaattacccagtctcaggtcattctttatagcagtgtgagaacagattaatacaacagggttccccatggatctgttataaaaattaggttgtggatgtctatcataaaactccaggaggctgggcaaagggtgattggaaagcagtgagcaggcactttcagagctcatgtgggacatggggggactcctgcattcctaccagccagagtggagcgtccttgtagaaaatctggtgcgttcagttgacatcccagaaaagtcatgtcttggcaggaggagtaaagaagccctaaataaagtctaatctaacccctttccttcagtcaaagcttcaaaacaaacctcaaaagggtcagggtaatttctaagtaactcagctggctgccagaaaaatatctaccaatctttagaggaggacaacaaaatctagcattaagtaaggtataattaacaatgttcggtgtcatataagaaatacagacatgtaaaaatgcacagaagtgcaactcctaccaagagaaaaaccagtcaatagaaacacactcaggaatgatggatgttggaaatagcacacaaaggattgaaaacaccaattacagatatacacacgaatttaaaggaaacatgaaagtaatcatcaaagaaggagaaaaattaaaaaggaaatacaagggccaaaaataaaaatcttaaataaaaaaatttctttatgaaatgaacagattagacgtgaagaagaaaagatcagtgaacttgaaagttgcaatagaaactttcaaaactaaaattcagtcaaaagagactaaaaagaaaatttaaatgaatctttagtaacctgtgggaaaatattcatgcaagtatatggatcacatacttgtaattggaagctgagaaggaaaggaaagagggaagagaaaaaatatttgaataatggtaaaaaatgctccaaatttgatgaaacatacaaaaccacccatccatgatgctcaatagatcaaaagcaagataagcacaaagaaaactatgcaaggtaaaacataatccaattgctaaatgccagtggctaagaaatgtgggtgggcttcatcaaatctattgaagatctgaatagaacagacagactgactctcctgcaagtaagagagaatttcatcctgcctgactgctttgagctgggaggtggttttttttttttcctgccatttttgaactgaagtatcagctttttatgagtcttgagcctgccagcctttgaactggaagtacaccattggctctgctgtttccagcttactaactgcagattttgggacttgtcagcctcaataatcataggagccaattccttacacacacacacacacacacacacacacgttatgcatatgtacaaaattatatatagttatatattatatttaagtataatcatatctatctattccaaaattgggtctctaatctgattacattttaagttgctaataactttatttccaactgtaaagagagcactaatagtccatggcatgatctaacaataaagatatcaccactggatactcctaatcaaccccttataagagacaaggagctgggtaactgtgtatactttcaattattttcctcacactaacaaatataataagactcaccaggtgtttctaatgtgaagtgatactaagtggacaaaggatgaaaaacacttaatggtaagtatgtgggtaaatacaaaggcttttctcatttttaaatttccttaaaagataattgattgtttaaacaaaaataataacaacgtactgtgtggcttataacctattaaagcaaaatatgtaatgatagcatgatggacagaatggaggaaatggaagtatatggttgtaaggtcttacattgtacataaagtgttataatagtatatttgtaatgagctaatgatacatattgtataccctcatgcaaccactaaacatgaagccagagttatagctaatgaactcacagtggagataaaatagaaccataaacatttttaattcctctaaaagaaatcaagaaaagagaaataaaggatgaagaacagatgaaataaacagagaacaaatgacaaatggtagatttatacccaactatactgataattatataaaatgaaactggtctaaaaattccaataaaaagacaaatatttttagactgtataataaggcaagactcaactctatgttgtctgaagacctcaataatttaaaggcacaggtaggtcaaaagtaagaggatggaaaaaaatatactatgtagcaccaattataacaaagttggaggggctagttaaatatcagaaaaagtaaacttcagaacaagaaatatgcagaacaagaaataaacgagaacatttcataatgataaatttatcagaaagagaaaaattgtaaacatatattcacctaataatagaacttcaaaatatgacaaagaaatggacagaaatgaagggggaagtagagaaatctacacttatatttacaaattgtcatacttgtttctcagtaacttatagaacaagtagaaaaaatgaataaaggggaaggacacttgaacaatactactaaccaacttgatttaattgatgcctatagaaccttctacctaaatacagatttttaggtgtagtgttttatatcctaggaatgcaaagtcagtttaatcaacagcgcaataaatcaatcaatgcaattcagcatattcgtagaatccacattgtttccaactgaacacaaaactttcattataatggaccatatctggggcagaaaacaagtttatacatttaagaggaccaaaataatatagaacatgttatctaaattcagtggaactaaaatagaagttaatagcagaaggatatctagaaaatccccaagtatttggaaactgagcaacatacttttaaataatacatggatcaaagagaaaatcacaaaagatattttaaaataatttttcctaaataagaattagaacacagactatcaaaatttttgtaatgattagagacaaatttataactttaaatgatttttattagaaaatataaaaagtccaaggtcaatgatttaagctttacttttagaagttggaaaaagaggagccaattaaacctaatgtaagtagaagaaaggaaatcaagttaatagcagaaaacaatgtaatagaaaacggaataataaagaaagtcaataagataaaaagttctttgaaaagatcaataaaattgataaactcctaataaaaagtcataaaacaaactaccaacatcactaataaaagagggaataaaaattacagactatgtagagattaaagaaataatatggggatattatagaagctttacggcaacaaatttgacaacccagaggaaatgggaaaatttttcaaaagaaaaattactaaagcccagtgaagaaaaaatagataacctgaatagctttataaccattaaagaaattaactttgtaattaaaaactttcacacaaggaaaattccaggctccagtgacttctctagtgaattcaatcaaatatttaaggaagtagtagtatcacttttatacaaacttgcagaaagtaaaggaggaggaaagactttctaacttaatttatgggatcagcataatcctgatatcaaactcagagaaaagatactacaagaaaaaaatcttataggccaatgtccacaaggaatatacatgcagctgggcaccatgctcacgcctgtaatcccagcactttgagaggctgaggtgggtggatcacttgaggccaggagttcaagaccagcctgggcaacatggtgaaaccccatctctactaaaaatacaaaaaattagctgggtgtggtggtgtacgcatgtaatccccgctattcaggaagctgaggcaggagaatcacttgaacctgggaagtggaggttgcagtgagctgagatcgtaccactgtactccaggctgggagacagagcaagactctgtctccaaaaaaaaaaaaaaaaaaggaatatacatgcaaacatccttaaaatatttcagtatgttgaatctaggaatatatgtagagggtaatacactatgaccaagagtgcttatcctagaaatgcaaagttaatcagtgcaattgaccaatcaatgaatgcaattctagcagtttaaagcagaaaacccaggtgatgatctagatagatgttataaaagcatttgacaatatgcaatactcattcacgatgtactttttttaaaaaaaataaaatcctcttaaaacactggagtagaagggaaactcatcaacctgaaaaaatgctgtcatgaaaaacctacaggtattatcaaatttgatagtgaaagtcataacgttttcctcctcaggttgggagtgaggcaggaatgtccacttttgccatgatcattcaacactgtaccaaaagtcctaggtggtgcaataatgtaagaggaaataccgacataagattcgaaaggaggaggtaaaactgaatccattcatagaagaaataataatgtacttgaaaatcctaaggaatttacaaaaagttactaaaataagcgaatttagcaaggtcataagatacaatggtcaataaacaaaagatcagttgttttcctaaattgtggcaatttggaagattaaattatataaataatactgtctatagtaccatttgaaaatacttacaagatgagcaaaatctctatgtaaaaaactatgaaacattgtggagacaaagtgaattgccaatattgttaagaagtcagctctcctgatttttggttgaaattgacaaagcgattccaaaatctacatggaagtacaaataatctagaataatcaaagcaatttttacaaagaatgaatgttgaggacttatctactttatttcaacattacaggaaagccagtaatgaagacatgtggtataggtttcagtttagacaattcatcagtggaacagaatcagatgtcctgtttctggacatacataatatgttgattcctaacaaagttaccaaagtaatttgatggggaaaaagatagtctttgaataaatggtgctaaaacaagtgaagatctatacatgaaaaaagtgaacttcaacccttacctataccataacttgaaatgtatcacagacaaaaataaaagctaaatttgtaaagcttctagagaaaaacataagagaaaatcttcacaacttgggcaggcaaagatttctcagggcacataaaatttttgaggaaaaaaattgataaatgggccttattgaaattaaaagtttttggtctacaaaagacaccatgaagaaaatgaaagggcaagttgcagaccaggagaaaatatacacaggtatttggcaaagtaatggtatgcaaaaattaaaaagaaccctggaagattagtaagaagaagacaaaacaactttatcaaaatgggcagaaaattttgagcaaacacttcccgaaacaaccaataaacacataaaaagatgcactgcagcattacacatcagggaaatgtgacgacccctcacaccatgaggatgcctgaacttaaagatcgacaattctgaatttttgtaagaatcaggagcaactggaactcttgtacaatgttagtggaaattcaggattaatgctgtcacttcgaaaaacagtttggaagtttcttatgaatttaaatatatacttaccatacaaaccagaaatttccacatcaagttaaaaagctgcacagcaaaggaaatgacaaagtgaagagacagcctacagaatgggagaaaatatttgcaaactacccatctgatcaataaccagaatctatgcaaagctcaaacaactaaataggaagaaatctaataatataattaaaaatgggtaaaatatctgaatagacgcttctcaaaagaggtcatacaaatgaaacataggcatatgaaaaggtgctcaacatcattgactgtcagagatatgcaaatcaaaactacaatgggatctcatgtcaacccggttaaagtggcttttatccaagaaaggcaataacaaatgttggtgaggatgtggagaaaagtgaacccttatacactgttggtgggaatgtaaattaatacagccactaggatgaacaatatggaggttccccaaacaactgaaaatagaactaccctatgatccagcaatcctactggtaggtaaatacccaaaagaaaggaaattagtatatcaaagagatagctgcacttccatgtttattgcaacactattcacaatagccaagatttgaaatcactctaattgttcaccaatagacaaatggataaagaaactgtggtacatatatacgatggagtacgattcagccataaaaaagaataagatcctgtcatttacaacaacatggatggaattagaggacataatgttaaatgaaataaaaaaggcacagaaacacaaattttgcatgttcttactcatttgtgggagctaaaaattaaaaatattgaactcatggagatagagagtggaatgatggtcaccagagctgggaaaaggttgtgggtgtggggggtgggaaatggagatggttaatgggtacaaaagtagagttaaatacaatgaataagatgcagtatttgatagcacaacaggttggccagtcaacgataatttttagtatatttaaaaataagtaaacgtgtataattggaatttttgtatcacaaagaaatgataaatgcttgaggtgatggataccttgtttaccctgatgtgattattacgcattgcatgcctgtatcaaaacacctcatgtactccataaatatatacacctactatgtgcccataaaaataaaaaaaaaaacagaaattcctctcctaggtatttatttattcaagaggaataaaaacacctgtgttcacaaggacttataaacaaatatttataacaattttagtagcctcaaactggggaaaaaccccagacagtagaatggataagcaaattgtgatattgctgcagaatggaacactacccaacattaaagcaggagagattacagatacacatgacaaggagaatggagctcagaaacattatgatgagtgaaaggagcccacacaagagactacagtcatggtggtatagtttggctgtgtccccacccaaatctcatcttgaattcccgtgtgttgtgggagggacccagtggagggtaatggaatcatgggggcagatctttactgtgctgttctcatgatagtgaataaacctcatgagatgtgatggtattataagggggagttcccttgcacaagctctctctttgcctgctgctaaccatgtaagacgcgacttgctcctccttgcctcccgccgtgattgtgaggcctccccagccacctggaactgtaagtccattaaatctttttttttttttgtaaattgcccagtcttgggtatgtctctatcagcagcttgaaaatggattaatacacaacgatgctcaatgacagtgatgcgttctcagaaacacatcattaggggattttgtcattgtgtgaacatcatagagtgtacttacacaaacctaaatggtacagcccattacatacctgggctctatggcatagcctgttgctcctaggctaccaatctgtgcagcatgtgactgtactgaatactgcaggcaactgtaacacggtaatatttgtatatccaaacatagctaaacataggaagggtagagtgaaaatacagcatagaagacaaaaagtagtgcacctctgtggggcatctaccatgaatgaagcttgcaggtctggaaattgctctggatgagctagtgagtgagtggtgagtgaatgtgaagtcccaggacatcattgtacactattacagattttataaacactataaacttaggctacactaaatgtattttaaatttttttcttccttcaataataaatgaaccttagcttctttatgttatcaactttatttttttaactttttgacttttttatattaatacttagcttaagacacatgttgtataactgtacaaaaatattttctttctttatatccttatcctataagcttttttctttttttacattttaaattagaaaaaaattaaaatgaagacacacacattagcccacacctacccagggtcaggattatcaatatcactgcgttccacccccacatcttgtcctaccagatggtcttctggggccgtcatgcacatggagctgtcatctcctgtgatgagagtgccttgttctggaatccctcctgaagaacctgcctgaggatgtgttacattaactttttctttttaataagtagaaggagtgcattgtaaaataatcatgaaagtatagtatagtaaatacataaactgctaacagtcgtttgttatcattgtcaagtactatgcactgtacataattctatgtgctagattttatacaactggcagtgcaggtttgtttacaccagcatcaccacaaacacctaaataatacattgcactaggttgttgccaggcgataagattctttcagctccattataatttaatgggatcaccgtctgtagttgactgaagtgtcacacagcatgtgactgtatgcatattcacctcctagaacccagactcatacgaagaagtagggaataccctactcgcaaccatgttttatttcctagtttcttccattggccattttctttttcaggctggagacttccctcccatccccactggcgttcccagtctctctgcctcctaagtcttcctctgttgctctctggggaccagcttgtgcagcagttttgtatcactgtagggtagggcttcaatgagccctgtcctgtgtccttccctggctcactgcgtcttgccttcccttcctcgcacagcccagggcctgacaccacctcctgcagttggtcattcaggagcagggcactcagggaaggagacggctctgcttcgagtatagcctgggcaccatccacaaacgccttggtgtttgaactcacctgtgcatcccagatacaggtatagtctctccaaaacaaagggtgtaggaaatatttttacttctccatctttccaaagtatccttcccttagtatctcagcaaccttccccggagaggctctttgggctgtggatgtagtacccagtatcctgggctgcagattcattgattttccatgctttgattgggtataatcatgctcagagctgagcaaggttggcagtgagtgggtcactgacatcagcttattcatgatctctctgtgctccgattctgacatgaacttccttttctgtctcagaggagagagatttcagggctgtgagcctgaggatggaccaacacgcacgtcagttgtgtctctgaggactaaagatggccaggacccaggaccccagctagcctccagatgctgctggctgctggggacccgtgacctaaggcacacccctcaacacattttctttcattcctgtcaatctcctgtactggtgactgggctgggacctcctgctggcctccagggccccacctgagcctctggtcccggcctcagtcaggcccaggcctaggggaccggcttcttgtttcctttcccgagagctctctgggagtccttacaatagattccaacccaggcacttttgacagtgaaagaagatttgtattattttcttagggctgccgtaacaaattgccacaaacttcacggtttaaaagaacagaaatttattatctcacggttctggaagtcagaagtccgaaatcacagtgtcacagggctgtgctccctacttaggctccaggcaaggttcttctttgctttcctgcttccagtagctccaagcttggctcgtggctctgatctctgcctccagcctcccatagccttctcctctgtgtgtgtctctccttttctgtctcttacaaggactgagtactcaaacttatatctaacaaagtactggtatcaaaaatataaaaattactcctgcaattcaataataagaagacaaacaacttaattaaaaatggcaaagtcaggatgaacttacctgaagatccttaatttaattacatctacaaagctgttttatccaaataaggttatagtcacaggatccaggagtttggacccagaccaaccttttgtgggggccacaattcaacccactccaggattttaataataactattccataacaaaagacagaacaccatgactgtccctccattcacctgcatggcctctgaaacctaaggacaccttagaagtggcatctctagctcggcgtggtggttcatgcctgtaatcccaacactttgggaagccgaggccggcagagcacttgaaatcaggagtttgagacaagcctgggcaacatggcaaaaccccgtctccactaaaaatacaaaaattagccagatgaggtggtgcacgcctgtaatcccagctatgtgggaggctgaggcaggaaaatcatttaaacctgggaggtggaggttgcagtcagccgagatcgagccactgcactccagcctggaagatacagtgaggttctgtctcaaaaaaaaaaagtgtcatctccaccactggctccctgggccacagacaggcagggaggaaaaggactcagatccctcgtgtgccttccaccgacggcttcgcctcctcctctaacaggtctgtggtctgatgttgagtccatgtggcccccagtctatgccggaggtactccccggctaaccctagaagccagttgtattagtcctttttcatgctgctatgaagaaacacccaagactgggtaatttctaaagaaaagaggtttaatagactcacagttcttcacagggcagcaggagagagaatgagtgttagcaggagaaatgctgggcacttataaagccatcagatctcacgagactcactcactatcatgagaacagcatgggggaaaccgcccccattatccaattaccttcatctatctagtcctaactttaacacgtaaggattatggggatcgtaattcaagatgaggttttgggtggggacacagccaaatcatatcaacgatgttatcctgtcagaactcaagagaagggtgagggctgggggagggccgggggatgatcccatctgaagtggccagtggaagcagttggccttctggagagggaggcaggaaaggctaggaggtaggtggccttggaggcccagagggtagggggagaacgtgggggtggagtgacagctggacatcccgaggtagggactggaaaaggaggcctagggagttccagatgtacccacctttctctttgtaacttaatgctggttgcatgacctgtaggtaacgttgcaggggacttggggtacagtatgagctctgtggttccctgctttgagaaaaggaatcctctttacaaactttctatgtgattgtggtgggggtaataataaagagagccccccactgcccaccacaagggcagtcagaggacccacattggccagagtgtgtcacacattggacgtgcttattaggttgggatcagcacgtggacagcagggccaactagggtccattgttaggaaactgagtgctgggagagcagttgtctctccttcggcatgtgctctaaggagtctgagcttggacctgctgagcaccatagctgtctcctggggagactgtgtctgaagctggagcccaacagagccctgcagaggccagagacggggagggaaagttcaggaccttgcttggactcctggatccaacctcacttcaaagtcatggtcacggatttcccagttagagagctcaccttgagaggtggggtctctgtcccatcccctggaatctaggtgagctctatgacttctctgacccatagagtgaggcacatggtgctgtgcccgcttctaagctcagggctaagaggctgtcagcttccacttcctgcctttctgatccagatgccatgctgtgagaaggcccaagccacatggaggagctgtgcctaggcctgcagaccacagccctcactcggttcccagctgccagctatgtgaggaagccacttgggatgtccagccctgtcgggcctttggatgactcagacgccatctgactaacccagggagagaccccacacaacacctgcctggcttagccaagccaactccttcaactgtgaaagatggtgacaaattattgttttaagccactaggttttgaggttattatgcattatttgaaaataattaaaattatttcaaaaactgtttattgtgactgatatggatgcctaaggtccttgcataaatgtgtcctcacttgatttagatgccaaaataggaatctgcaccttgaatctcatcatgagctccatgaagctttgggtagcctcaagaattctagagtgcaggggcttaaattcaaataactctggcagaacactgatggcctccctcctctggctgtatcatgcacagcctgcttcagctaaggggacagaaggagggagccagcatttctctgagaaccaattataaacaccttgggggaactctcatgatcagtaagatgctttctgagcatcgctttatgcatatgctaagaagctggggcaagagtagctttttttttaatagtacattttatgtaaatttttactgaagtgaacagacatatacaaaaatacacaaattataattatatggttcgattaatctttgccaagggaaccatgtcaccagcactcagattcaataattgaacattgtaagcacccaagaaactgacttgcaccctgtgttgatcatgcccccccaacagtgatagtcacctcattctccagaggccttaggcattgcctcaggatcatggtggaagcttctctgggtggggctgcttggggaccagccatcctgcagtgggcccatgataagcacctgtggcgccacacccctggctagcaggcctgctgggaacacctgtaggaagaccttggcaggatcattggcccttgagtcagctgcttgctcaacttcatgatcagagataaaggtgaatgcaagtactgtggccatgccatgcttaggactcgagaatggtgcagcctctctgtaggccagggaaggaccactaatatggctcccagccaagggcctcagggattctgaatggcacagtctctgcagaacttgcactgtgtggcttcaggtcttccaggacagctaaaatgtgtgggccttgagggtgcctttgggtgctcatagcctcattagggagatgaagaggtgagcagatgtcacatatgccaagacagtggaagcattaagaaaggggaaaggatggggaggatatcaccccaaaggtatgggaaaggacctggtatgtctggaaagtgaagaaggccagtgtggctggaacaaaaggcacctggccagagagctgggagatgagggcagacaaggaggaaggggctttccaggcaaggctgaagcctggatttacccagaaggcaatgaagagccaccagacactttaggggggccatggtgttgtaaaatgaagcatttgggctttgtcccaggttcctggaagggagcttggcattttcagggtggcaggagtgtctttgctattcatcgtgggtccctggggccacaccggagtttatgctgaccaggtgcttcaaggtgggactccatagcttcaggatgcaggctggccaaccatggcaagaccagccatgtgaataaagggtcaggactttgagccacatgatatcagcctgacctctggggagagagtgggtattggaattgagtacaaaggtgtaagcaatgatttcatcaatcatgcctaggtaacaaaccccaataaaaactctggacattgtagctcagtgcagccaccctggttggtaatcgtataaccatgttctgggaggcttcacatttgggaatctccccaaacctctccctgtgcatcttttcatttagcttgtcctgatttgtaccaatcaataaaactggaattgtaagtgcagaggttggtgagtcattctaatgaattatttattcaacttgaagccctgagtgggagcctctatcttggtagccagtgattggaagtgtgggtgcactgggaatgcagctggcatcctgcagggccctaagtctgtggcatctgtgctaacatcaggtggttactgtcaagactttcttcactcagtcaggtctgtgcttcaggtgcactgctctgtggagtggggagggggcctggagtgcatttctgctcatggggctcatgatttgaactcaggcctaatatgttaatgagcagacacctggccaagccctgggggcctcaaaaaaccaagacaggggaagcatcaagaatgtgatgagagagtacgcggccatgggagtgtcacctttgccttctcttctccctgtggctggaaaggctggcctgtctggctgcccaaggatagacggggagaggtttaattgaatcacctactgtgttgggtaaagtaaactgtcgtcattgcaaatataatcaggactgtattttaacagtagaaaatgtgattataatgacatatttatcagctcctttcacctgggtggatctgaggacatttcagaaaacaagtgattggaattgcttggcctacctcacacacttacacacacacactctcacacactcacagagacacacacttataagcacacacagtcctgtgcatgcacacaagtgtatacacacccacgcacatttccacatgcatgtgtgtgcacactcacatacacaaacacacagagacacacccttacagggcatctggtgctctggcctgctctgacacgcagcccctcctgggagtgggcagtaagcattggggggacatgtaggtagtccctggggaagctggaaggctgaccacctggcgagcagcagggcacactcactggagcccctgcctggatgagctggctttgctcagctccagctgtggttccctctgtagactgtgggatcagaaagccctcatcacatgatgtaactctcacaaggctgcaatctacttccctgtccaggtcccagaggctccaggctctttgtggagtcacctgcttgggcagccacggttctgtggagctgcttgtcagagagtgcgcaggctctggagtcagtcagacctgggtttgactgctgactccatctcttacctgctgtgtggccatgagcaaatgcctgttctcactgggactcagtttcctcatctacaaagtgaaacgtgttcatacttcccttatggtcagtgaggatggaatgggataacattctgcaccccgcctggccccacaggcatatgaggtattcgataagtgaatgattgtgccagacaagaaagctgcctgccctcctcctcctcggccctgtgcagggactggggtggatgagaaagcccgtgtttcctgaacacctgtttgcaccaggcacctatttggctgctgcctggatgtccttctcaggttccagctcaggtctcttggaccagtcccctggtctggggtagggatgcctggaacggctctagcggcaaggtcatatctcgccaggctgccaggatgagctgagcattgtgtccacggtgggtgtctgaaggaaataatgtatacagtggtccatttccaagaccaagtgccttgaatcggcttaggtcagcaaactatagaagcaacaggacatactaggcccctgcttggatagctgctgcctgcttgtcggcctcccccttcttccctcttccccacccccttagttgccctcacccgaaccaaagaagtttagataaaagtttattagtctgcaagatagcttgatttgtctcttcttgtcagcctgcctagctacttaggtcataagtcaaacacttgaagagcccctgagctgactaggattgcaatgcattgtgagctgcaacaaaatgcagcaagacaaccctaaaaaaaaacacctaaagcccctacctaacaatcaataggcaacatccgggaaaattgtgaccccatagtactcagtctatgagcaactgggggagggacccgtactctagggataaactgcttgtcgaaactgctgggtgtgcttgtccatcagacacctgatcttgcaagttcatcattaaaagtttcactttcgctgttctctgggtatctgagtccattctttgggtttggacgggtaagtttgtttctcacatgtacaagccagaggtccatgagtgagaatcgggggccaaggagctttgtccatggggccgtaatgggatgagagggcagaggttatcaaactctgagggctggaggaagacatggtttctacctcttatctcatttcctactcatttagccttcggaggcaggcactgccgctatcccaccgaggaggagtctgacactgtgggtggtgaaggccacagttacccggtgagtagctgggctggactccacccttgctccctcctacaatcaacctcctgctcctcccaacaactttcctgaaaggaggcagtgaccactgtgcccttgcagcctccccggcaaccgacttctgaatcatcccactgcagagatctcattactgcagtgagtgtggctccagcctcccctcccttggctgctaatgagcgccctaatttgattgcctccaaatgagtgtgatgcaaaattaaaagatgccagaagacatgaccataaatccagtgagttggcttcaatttattatgtttgaattcaattagatttctcctccgatgttttccgaatatttatctagctgctggctacagaacgataactggaaggggctattactgtttaattccagcctcctccattcagcttgggctctggcaataccgttggatggaaaatctcagcctggatgtggggaggtcaagggagttcaaggtcagctgctgagccttctgccagccagccagcatatttcctgttggggaagggattcaaagcaatataccctattaaaatgttttaaaaatgatttttagtgcataaacactacaagggactccacagaagggagtgttggtgtcaaggcctttgttgtgtcacaggcagcaggggggatggggatctggggtctgggctcagcctggccacgaactttgtgtgacttgggaaaatcactaaccttttccagccttggcttctccatttgcaaaacgacggagttggactctgggaactgttttcagtggccctggattctgcactgctactctccttttagtttcagggtgtttgcccactctccttccccacccccacagccatgtgtcctgcttgaccctgggaacctgacttctttaagctgcctctcaggctttcttactgactgggcagaggttggaattagccagtgggagactctagctggaaggcaaaagtataggaagagagagagtggtcagtgtatccccccaccccgtccccactgcccctccccaaggctgtgtctctccaagacatcagctcctgctggaaaccccttctccacatctctagctcttactggctgtggcaacactattcctctctgtctagccccatgagtaacagcatcctagagttgtttgttttcgtgcttctcaacatccctgttcatcctcttcacctggccacacttctgtaaggactactgccattaaagtctcatcatttgaagcattcaatgccatttcttgccatgaccctgaacaatgcagatactaaatccatttttcgactgtggttttccatggagggctccccaggtctagaggggagctgagacaaaagcattcccggcttgggagcctgttgtgcagttggggaggtcccagagcaccaaggccaagctggggagacgttgtccctatgggcatggccaggcctccggcctcagggaggagagggagacggtgatcatggaggggaggccctgggagtgagaagctgggggaattgttccaccctgcccctccccccaacctccagagagcgaaagacgatgggatgtgggaggacggcaaaggggaagaggaagaggctccctgtcctgctgggtccttagccaagttggaagtgggagagtgagaagcccccatctagggtaaaggagtatgcccccaggggaggagagaaaggctgatgacacagagggctcatttgctctgaaatgggcctcccagtggaacagtgacgaagaggcagagtcagccgtggcggaagagcaggaaggagaggagtcccagagcaggatggagggagcatcagggagatgggtggatggccagggctggcctatggggcgatgaccaaaggttgcaggggtgggttcaggaatgagaccaatgaagtctcctgatttatggcttccagctttggtgtaagtcaatgacccgaatccctggagaagggtggggaatctgactctgaatatgtggcccaggagccctgcatgaaggagctggggcctgaagagtaactctgcattgagtactaggcttccaaatcagatcctggccagctgctgtctctgatggctcccagtcctcccctcagacccatggctgtaggccagactggcaggggcaagaggcaggagccaagtgggacatgtccagtgtcctggccaaacatacactggacgcagatgagccatatgcctgggaaacagagaaatggggtgaggccaggtcttcttgtgagaatgaatgtgccttactctctcctggagagagggtgatgacaagagttcattcattcattcataattgctttttgatttaagcaggcgagtttgttgtttaacaggctgggaacatctctcttttattgaaacatgtgacatagcaggttaaactcctaaagattcagcacagcagatgagaatcaaggagtttccttcttaaaaagcataacttgcatatgaatgaagatgattccaaattatgttttttccccatgaccctaaaattttatcccaaaaggagttatcatattagatattgatcagatcagcatttcatatcaaagctcaggacatccatctaaatatttaaaaatctttcactctcacagcacatcttgtgatcaatgtaaaacaaacagataggaacaaatcaaatatgagagaagggtttatggtgagagaaaacagtttctatcctctcccctccccagtcctggcctcactctccagaggcaacttcttgtaaacatttccatttttagtacttctggtgggtgcctccacaatgcttagtagcatgtataggcacccttatttttttattcatctggagaaaatttatctacctcctgtgatggaacataagaaatggcctcattatgcacctctgcttcctcccttcatccttccaaagttttatcattttggcataattatttttagttttctgttatttacttttaaaactttaaaccatataattgtactttgattctgcattccatccacctcagggagagtaacggtctggggcggtcaggttgggtctgttcccataccctccccttcttctgaaaggactctcccctccctcccgggggcctgtgcccatgaccagccagtcacagggccaggcatatgtcctgggccctggccactgtgggatacaggcatgctccccaatcttgaccactaggaatcctgcaggactttcactactaaaactgctctcttcaggtcacaacagtaactatcagttcaactacaccaaaggtttctgaagacaatggcttctccacccaagcaggttgtatataaattccaaatagaacttggcatcaccctgaaggaattctaacttcacactgttggggaaatttaccaagatagcttcagagtaaactaactttacacagcacattaaaacaaaagacatttattcagcgtcatgatcagactattacatttagcaatcaacagcatgggtgcaaaaaaaaaacctatattaaaacccttagctggaatgctttacacttcccacagaacagaaactaaaataacctgttatacagttagtcacaaatacagtcctcgagttttttgcccatacacatgagtatttgtctaaaacatgtcttctttgtagcagctaggccctgccaccactgtgcttggctgagttcacaaatctgtcgtaacctgtagattccctgtcatttctctggctctcctctcctgctaagctttgtttcctaattaaaatctgccactgccatagctactgctgctgctggaaccgccaatagccaccttggtttcatggttttgcaaagtataggcctccattgccacaggggccagagcttctgcctccaaaatttcctcccttcatgggtccaaaatttgaagactcattgttgtaattgccaaaatcattgtagcttccaccacctccaaaattgcttccatcattaccaaatccattacagccatccccactgccaccatatccaccaccaccacgactgccaccaaagccaccaagaccactgaagtttcctccaataccaaagttgtcattcccactgaaaccacctccacgaccaccaccaaagtttccagaaccacttcgacctctttggctggatgaagcactagccatctcttgctttgacagggctttcctaacttcacagttgtggtcattcacagtatggtatttctgaatgacaatcttatcgacggagtcatggtcatcaaaagttacaaaggcaaagccccttttctagccactgactcggtcagtcatgatttcagtcaccattaaaagggattacccaagcaaaatcatggaattattggttataaaagtaattgttggcacatcctatgtaacatatctaattgaataatggtaccagattaaattatagatgggaatgaagcttgtgtatcatccattatcatgtgtaatcaataaacaatttaattctcttgaaaaaaataaataaaactgctctcttttgttctgggattacctctaggaaggaaatgtaaagtcagctcttgtagggtgcctccaggcccctgacacgtggaaagatcgtgcaggagaaaaccaacccagaggtcagtggaggtggagaggaagttgtgagagagatcaagctgtggtggtgagaaaggcagctggtcctgctcactgaagcctccattgcttccggactgtcacagttacaccgacctgacaatttcagtattagcattagagaattgtttcagctttccaactaacacagggtgtattgtactccccacctcaggtaagatgagaattagcacgtaggctgcctgtgctagttttctgttgctgctgtaacaaatttccacaaatttatgatttgcttagagcaccacaaatcttagttctggaggccagaagtccagcatgggcctcacggggctaaaatcagtgtcacagggcagctgtgttcccatgaggcggctgtgttcccataaggctccgggtggagactgtttccttgccttttccagcttctagaagctgatggagttccttggccagccactttctccctccattgtcacagcaggtgtggcttcactctgacctcttctgcttctcccttccaccgaagggcccctgtggttacattgggtacacctgggggcttagcctgtctaatattgccacaccctcttgtgaatcttcttttttcttttctaagagatggggtctcgctttgttgcctaggctggagtagggtggtgtgacggtaacaaactgcaggcttcaattcctgtcctcaagcgatcctcctgcctcagcctcccaaagtgctgggattacaggtgggagccacagtgctaggcctctcatgaaccttgtcttccagaaatgtgttggactctcatccattagtaagccatctttctctcttttttaatgcttttcccttatagatttacttcattttaaatttataagcttaaatttcagtgatgatgtcttaggaagaacaggagaggaggaacaaaggaacaaacttctttaatgggaagctgaaaggacccttttaaaagtgtgcagtggagagatcctgggcttggtctctggtaaacctggtgaatggtgggttaacactccctccctcactcggtgttgctgggaggataagacagaacatgtggcgagcaggtgtccaatagctgcctcttgctatgtgcagccagtgccacatccaggctgagtgctgtggggagtgtggctcatcccactggggccacccctggcctcgctcactggagactccagaatcagggctgactgagcagcttgtggcactgaagaatgttctaggaaaggaggtgtgtcctccttggaaggggaagcttcatggtgggtgagctgagggtaaggggtgggtgagggccatttgaagagtcacctcccctacattcttttatcttttggagcctccatccacgccacttcaaacaatgaacacacacatccaagtcagtaagtgcactttgtgtatatctatataagtgatgcgcaattactgtataacagttcactagctgacctgacattattcacatatcgtaggcatgtgactaattgtaggtgtgtaatgaagtgttcacatcttattacatatttaattcctaaggcatttctacagttttatttgagaattttggaactgccagtgtgtttttcatgtttcaaaccttttcacaggccctgaaaaaacccaaaggccttatattctgggaccgtaatggacaaaacagccctgggaagtatgcttgggaggatggcgaaggctgggtttgctgagggaggtgccagctaaggtgctgggcacaccagaggcaagggatctggaccacaactgtcagtttgatgaacacactaatggtggagtgacccccaccaggagtggccagcaagcagggtccaacaggaaagacatctgggaggccagcaggtggaatcctggctctgccaccttcgtgctatgtgatatcagccaagttacttgccctctctgattctcaaatgctcggaggccctttgacctctagagtctatgggacctgagtgaccacagggctctggtttgttggtggctgcctctttatttaactccttttctcaaatacggtctatgggctttgcttaaagtgaggtgtcctgtgcacactcttctccatgactttgaggccgtgagaaggcccgccctgcagaaggactgaggaaactagtgctggagtctcctttcttgtatcagtgaaggaaggggagagaggagataaagtgctcaggttacagaatgtgaggatcgtgccccttttttccaactgaagacattcctaggcattttatctcccctgttgcaacttctaaatcacaaaaaccttatgcatccagtttggctgacatccacctgcaatgggagtgagtgagattgagccactcctcaggtgaatggaaaattaaggccaaccaaggcccaccccatgccccactgtggggtctaaaaggagcaggcactggcctgctttctttttccctaaagaaagctctttggggacccagcagaaacagcagaggtggggatgcgagcttccgcctgcatttgttccagggtgggccagtgaggatttgggaggaatggtgtggaaaggccctgcccaagaaggctggatgctggctggggaatgcccagggtgccagctccctaccctggggaaaggccaggctggcatatgccggagccagggtccaaggtcacagagaggccacacctgggcacccctcccagcaagggaaggtccaagctgggaattacttctctttggaaagtgaggggagtggtacagaaatagtgctattgttgctgttgtcctgtcacttctggcattggaaatggtgttgagcttctacgtgacgggcattggaggtcaaacctgaaacaggtgaggcccatccctttactaggctcacgttctaggtagggaggaggcaggtacctcctccacctaagaaacaacaagagatagagaatgcagtaactgtcctaaagagaaaaaccaggggatggagagagaataatggttgtcaggacgggtcagactttaggatggtaaatgaggagtggtctctgagaagggatgaggcagaggaagtgaggctcagggaagtgaagcacttgcccaaggcagcctgctggtcatggcagagctggcaagctcattccctcctcattatgtcaaccttctgggaccagagtctgggcagggcagaaactactgcaccaggggtgcgtggctccagcagagagagacaaagtgccccatgcaatccagaaactgagccctctgggctcaatcttcaaaggaatgactctcagagttgtgtcccctgccttttcttcaccatggaacttttcccagctccactctggtgggcttggggacaggacctgccctctgcaaagtgatgaccaaggataagtcggattttcaaggagaccttggagaacaccaccctcttattgtgcaaaagaggaaacaggtccagagagggtgagccattttttcagcatcacacagctgacctggagcagagtttcctaaaagctccctcggtgctctttcccctgctgtggctagacccctccacaggaacttaacaggaacccaaaggaacgagtcactcatggcagaatcactaatgtgatggagggcaggagtgagagacggcataatgtcaatgctggcacactcctggcacacgggaagctgtccatgagtggttgcttcccaccacttccatcgcccagtttgggacatgtctgagatccagtgctgagcccagggtctagcatgtcatgggagctcaggagttcctaattgactacatgaatgctaaggtgtgggatgtgctccttcctgctttctcattctcaaagaacactcttatacacctggttgtggggagggtatataggcaatcaacttttgcgtactcacttccattgtaggatcatgcatgcatgtggacgtgcgcacacacacaaacacaaatgcacacacacacacacacctgccttctcaaacttgtgggaccagaaaggatgctgcaaggcctaagataataattgctggtctcttttttcttatgctttagcaggaaaaacacactcttccaagcacacagctgcagaggtcttcctgagcatcatgtagtctttaatcatgttgtggaggacaggatgatctgtgcctcaggaatcagcttagttgataactcaattccatggctgggccccatttgtaagcagtcatggcacatcccatggaaacctataatctaattatggctgctgcatcagtcctcatccttcatgctgtcatccacagctcctcaccacccatcttacttggatgaaggctctctgaggtatgaaggacaaacatctgatccttccacttgaggcctaggctgctttccttattctcacagcagccacaagtattgggatcacagcttgaaaggctcttcttggtccgtgggactgaggcagtcaggacaatttcaggcctttagtgaatggaggcatttcattacttcagatctcacctagtcttggaggtcttgggcatttttagaactcacccagccaggctgccactcagggtgaggctacctggattgtttattggtaacgaatgtttgaatcagagaccgttagaaaaccaaaaatgaagattttaacaatacaaaaagcagaacctaaagaggtttaatcagtaggattggtaccagttctttgtatgtctgatagaatttagctgtgaatccatctagtccagggctttttgttgttgtcgttggtaggttttttattattggtttaatttcagagcttgatattggtctagtcagggtatcagtctcttcctgattcaatcttgggagattgtatgttcccaggaatttatccatttcctctagattttctaatttgtgtgcatagaattactcacagtattttctgaggatcttttgtatttctgcatgtatcagtatgccatactgttcaagcacatggactttgcagttggacattcctgagtacaaattctgcttctggcagagcatttaggtgacttagtctgctgactaagctgcagtatcttcatctgcaaatgaagatgaattgtaatatctttgtcatttctcacagtacttatttggaaattcttttttctttgttaatctagctagtggtctctcagtcttgtttatttttttgaaaatcaacttttggtttcatttatcttttgtatggatttttgcatctcaatttcattaagttcttctttaattttagttatttattttcttctgctagctttggggttggtttgctctttttctctagttcttctaggtgcaaacttagactgttaatttgagattgttttaacttcttggtgaaggcatttaacgttataaactttcctcttaacactgctttggctgtatcccagagactttgttaagttgtatctccattttcattactttcaaagatttttttatttctgccttaattttgattttcacctaggagttaatcaggaaaaagttgtttaatatccatgtatttgtgtagttttgagagatcttcttgatattagtttctatttttatcgcactgtggtccaagagtgtgtttggtataatttcaattttttaaaatttattgagacttgctttatgactcagcatatggttgatctgagaatatgttctgtgtacagataggaagaatgtatattctgtggttgttgggtggagtgaatgtctatgaggcccctgtagataaaataatagctgaaattagaaaaagaggtttaaccagctttactcatttaaaatgcaaatgtgctattagataagggccacatcacttggcatcaggccataagacaagatgtgtgtggattatcctgggattaatactcatttccaaacttctaggactattgagagttgttttttttttctagaaatctctgatggactacatttgttccatagttcagcctcatcatcttatgaactatttagataagggatagaaagtatcttttgaattcatgtcagcaccaatagattggtggtcgctgctttaaaaactgggcctagaaggattctgaattcttaactgggcttagagcgaaagaatgccatgttcaaagaagaaagttatcaatggctgcaggaggggtgaggtggcccatgtgtcacatgacttgctatctttgcactgggcaaccctaacctctgagagggtccttgttgaataagataagtaggtccagccctcaagttgttatcagtatagcagagatggtgagccacgaagtgctgccagatcactgtattgtgttctggtcatggcaggtgcatgtatcagtatgccatactgttcaagcacatggactttgcagttggccattcctgagtacaaattccgcttctgacagagcatttaggtgacttagtctgctgactaagctgcagtatcttcatctgcaaatgaagataatacccacctcacagggtagctggggtcattaaatgatatcagatttcaaagcattagatgctcaccttgtagtaatcattattactataattactgttggtgtggaaacacagacacgcctctaaactgtcctgggtacagagaagtctctacagacaggccctgttttaaattgcaagtgatactcaggcagtcttcagtagacaaaggcagaggccattcagtgcaggggaggacattctgtcccctggttaggaaacctgaactatggaatagaaaaaaacttagactcaatattcagaacaactttcctgaaataaaggaagacttgaattttctgaccgaagggtaaattgatttagagaagtcaatgctgagatgacagatcctaacaaaatgaatgtttgccttcaaagaaaagaatcctaggagtatccagtagaaaaccatctctccaaaaaccaatcaagacaacaacaaaaataaaaacaactaccccaaacaatcacatgaaaactcaaaccaagagaaacacttgcagaatgtcagaataaggacttctgaaaatccttccttaacaacaatgagagcactggcaaaaatgtcaaaattaacattttcagagtcctggaaattaaccaaaggctttcagcaatccaagttagatttattcaagaaacacagctgaatctcagtaagaatagcaaattttgtggtgttttaatttgccttattcgtagtcttcttttccaagctctatgatagacttgaacataaatgttctcagctaggcatggtggctcactcctataatcctagcactttgggaggctgagatgggaggattgcttaagtccatgagtttgagaccagtctggacaacacagagacaacctctgtctttacacacacacacacacacacacacacacacacaattaacattctcacaaccatgacagctgtgaaaaccagcagcctggtagccactggggaggacagaataggtttaaagctctccaaaaatcccatcctcagaaagttgttactatttgatctgtctgacagctccctggaaaagacacattcccagggattgtctttgcttaacatggtttggagcttagtctgtgtgaacagccctatcctgagggaatctgtcaaaaacaatcagcaaaaattgtttgacattgcaactgcctgagatggcagtaccagttggggctaataagaggctgaccaaaacagttacaaggaaaaactggggaatgaggtattcatagaggctttggaaaagctctgacatattcttaagaacctagaaggccatgtgcacgtgcagggttgtacacatgtccaagacagatctaactagagcttaacttttgtttggctttgaggctctgtgcaagcaggaagtaaactctgaggcagagttgtcagctgcttgctgaagcatcgaaggcatggctcaacacaaacaaagcttcccagcaaaggtaggtagatttagttgtgcaaggaatttaaagaaatctctgtccaaaaattaatggacaactaaactgaggaaagacttcggtggctacacatgacaaaaagtatacattaaaacttagtccaggaaattcactaaacagagaaacagcagcatcagcaacaacaacaaacagaagcaacaacaaattgtgaagaggggtgaggtctgatttttggagatgccacattattttatttaaaacattcagtttttaagaaaaaaatatgagaaatacaaagaaacaaaatgtgtgacctattcacagggaaaaagctgccattagaaactttttcttgaggaagcccagacattggacttactatcaaagattttagaacaagtcttaaaaacatgtttaaacaactaaaggaaaacatgtttaaagaatgttaaaaagcatgacaatgatgtcttaccaaatacagcatatcaataaagagatagaaaattatataaaaaagggaaaaaaataaaattctgggttgaaagtgcaactgaaataaaaaattattaaccagaggggcttaacagccaatttgagcaggcagaaaaaagattcagtaagttgaatatgggtcaattgagattatacaatccagggaacagaaagtcaaaagaatgaagaaaaatgaacagagcctcagagagcataccaatatgtatataatgagaatcccaaaagaagaggagataaaggggcagaaagaatatttgaagaaataattgccataaacttcccaaatttgatgaagaacattaatttacatgctcaagaaattcaacgaactacaagtggtataaaaacaaagaaatccatacctagatacatcagagtcaaactatcaaaagccaatgacaaaaagagaatctcgaaagctacaaaagaaaaataactcagcatatacactctagcttcaaattcctcaataagattaacaactgacttcttatcaaaaccattcaggcaagaaggcaatgggataacatattaaaagtattgtaagaaaatgactgtcaaccaagaattctatatctagcaaaggtatctttgaaaaaaaagaagaaatgtccagataaatgaaaaatgagagagttcatcatgagtagatcttccctacaagaaatactaaaaggagtctctcaggctgaaatgaaaggacactagatggtaacttcatccacacaaagaaataaagagcactgcagggtaattacataattaaaaagacagtataatgtatttttaattgtaattctcttcttatcctatctgatttaaaaatagctacataaatgagtaattataaaactgggttgttgggcttataatgtataaagatgtaatttgtacgataatattaacacaaaggaagggggcaggaaatggacctatattgaagcaatctttaaatatattgttgaaattaagttggattgatatggattagattgttttatgataaaatgttataatccccagggcaagaataagaaaataactaaaaatatatggtaaaacaaacaaaagaattaaaatgatatgctagaaaatatcaattgaattcaaaagaagacagtaatgagggaaaagaaaaacaaaaaagatgtaggacatataaaaatagcaaaatggaaggtgtagagcctatcttttcagtaaatcatattaaatgtaaatagagtaaacataccaatcaaaatgcagaggttgtgattttaaaaaatgaatcaactgttatctataagagacatactttacattcaaagacacaaataggttgaaagtaataggatggaaaaagataatccatgaaagtagtaaccaaaggggagctggagtggctagttatactaacagtagaccaaatagactcttaagacaaaaattattacaagagacaaagaaaaacattttataattgtaaaagtttcaatctattaagaagacatggcaattaagaatatatatgcacttaatagcagagatccaaatacatgaagcaaaaactgaagtgagaaatagaaaattcaacaattatagttggagacatcattactccactttcaacaacggatagaacaactaggcagaagatccacaaggatatagaagatctgaaaaaaacagtaaacccactagagctggtagttacccacagaacactccaccaccatcaacagaatagacattctttatatgtgtatatggaatgttctcaagaataaatcttgtcatgagaagaatagtggcccccaaagatatccatgccctaatccctggaaccacgttacattacatgacaaaaggggctttgcagatatgattaagggtataaaccttgagatgcggagattaccctggattgtttgggtgggcccaatcaaaatacatgagttcttaaaagtggagacactttcctaaccatggtagggagatgaaatggaaggaggaggagacaattgaggtgtgagaaaggtttaagtgactactaaactgatggacttgatccaccattgctgcctttgaggatggaggaaggggactattaataagggaatgtgggtagcttctagaagctgggaacagttcagctgacagccagcaaggaagtgggaatctcagtcctacaacttacaggaactgaattctgccaacaactcgaatgaacaagggaactctccgagaatttccacaaaggaatacaaccacacagattcctatttttagcccagtaagacatgtcagacttctgatcttcagaaccacaagataataaatttgtgttaggtgcaaatttgtggtaatttgttatggcagcaatagaaaacacatacatgtatattcatccataaaacaaaatgcagtaaatttaaaataattgaaatcatatagaatatgttctctaacaatagcagagtgaaattcaaaaccaaaaacagaaagaaatttcggacatccacaaatatgtagaaattaaatgacacactccaaaataatcaatgggtcaaagaagaaatcacaatgaaaattagaaaattatttgaaatgaatgaaaataaaatcacaacatatcaaagtgtatgggatgcagtcaaagcaatacttagggagacttttatagctgtaaatgcctatattaaaaagaagaaagatctcgataacccagacttccaccttaagaaagtagaaaaggaagcgcaaactaagcccaaagcaagcagaaagaagaaaataataaagattgtagtggaaataaataaaacagggaatagaaaaaacactaagggaaaaaacaagagtaattgcttcactgaaaagagcaataaaattagtaaacctttagcttgactgagaagaaaaaagttatgtgccctatttcattccctatacattaaattattaaattattaatgtatagggaattaaattattaaattaataatgtttagagaatgaaatagggcacatcactaccacctcatagaaataaaaggattataaaggaatactataaacaattgtaagacagcaaaattttaacttaggtgaaatggaaaaattcctagaaagacaggaactacaaaaactgaatcaagaacaaatagaaaatttcaatagaccttagtaagtaaagggattaaattagtaattaagaaactcaccatgcacaaaaaagctcagtaccaaatggtttcgctgattagttttcccaaacatttaaaaaagattattgttaattcttcacaatcttttccaaaaatagaagaaacaaacttcaactcattctatgatgtcattattctcatgataccaaaacaaaagacattctaagagaacacagcaatatctttcatgaatattaatacaaaaattatcaacaaaatactagcacactaaacctagaaacatataaaaatgattatgtatcacaatcaagtgaaatttatttcaggaatgcaaagttggtttaacataataaaataaatctaattaatacaccacattaataaaatgaaggataaaatccacctaatctcaatagatgcagaaaaaacatttgacaaaatcaatatcctttcatgataaaacactcataaaactagaaatagaggagaatttatgaaatctaataaagaacatctatgaaaaaccacaactgacatcatcccaaagggtgaaagagtggatactttccttctaagaccagtaagaaggaaaggaagtccatgctcaccacttctattcaacattgtattagagatctgagctagggcaattatgcaaataagtatgtaaatttaaaaaatagcatccaaattgaaaagaaagatgtaaactatatttacagatgacataatctaaggaattcacaaaataactattacgactaataaatgagttcagcaagattgcagatacaagaacaatatgaaaaacaattgtatttctacacactagcaatgaataatctgaatataagattaagaacagaattccatttacaatggcatcagacaaaataaaaggcttatgaataaattcaacaaataagtctaagacttgtacgtactgaaaacaataaaacaccactgaaggaaattaaagaagacctaaataaatgaaaaaacatcctatgttcatggatttggaagacttaatattgttaagatgtcaatgtttcccaaattggtctacagattcaatgcaatcttgattgaaagattgtgtgcctttttctcagaagttcacatgcagatgcaagagacccagaatagccaacatgatcttgaaagagagaggactacacttcctgatttaaaaacttaatacaggttgggtgcagtggctcacacctgtaatgccagcactttgggaggctaagttgggaggattgcttgagcccagagtttgagattaacctgggcaacataatgagaccccatctctacaaaaaataaaaaaagattagctgggtgtggtggtgtgtgcctgtagtcccagcaacttgggaggccgaggtgggaggatcacttgagcccaagaggtctatgatgcagtgacctatgatcaaggcactgcactccagcctgggcaacagaacaagaccctatctcaaaaacaaaatgaaacaaaacaacccccccaaaccccaaagaaaaccaaacttactaccaacgtctaggaatcaagatagcccaatactagaaatgtaatagaattgaaaatccaatattaaaccttcacatttatggttaactgatttttgacaaaggtgtcaagacaattcaagaggattaaaaaaaagccttaacaaatgatgctgggccaaccggatttccacatgtgaaggaatgaagctggacacttaccttacatcatgtacaaaacttaactcaaaatggaccaaagttctaaatgtaagagctaaaactataaaaccatagaggcaaatgttcatgaccttggattggtaaaaggattattagatataataccaaaagcagaagtgaccaaacaaaaaaaaataagtggggcattatcaaaattgacagcttttgtgcttcaaaggacaccatcaagaaagtcaaaaagcaacccacagaatgggaagaagtatttgcaaatcatatatatatacatacatatatatatatatatatatatatatatatatataaaatttgataagccacttgtatccagaatatatgaagaactctaacaattcagcaataaaagacaataacctaattaaaacatgggcaaatgatttgaataaatatttgtccaaagaagatatactcatgatcaaaaagcacctgaaaagatgcttgacattattagtcattaggaaagtgcaaatagaaccgcaataagatacaactacacacccattaggatggctttcatagaaaaagacaggcaataagaagtgttggtgaagatgcagagaaattgaaaaccccgttcattgctggtgtgaacataagatggtgctgtcactttggaaaacagtttggtagttcctcaaaaagttgggtgtagtattatcatatgaccaaggaattccactcctagatacatacccaagagaactgaaaacctatatccacacaatatcttgtacaagtgttttcaaagcagcattattcataacacccgaaaagtagaaacaatccaaatgtccgtcaacgaatgggtaaacaactgtggtattcctttccagtggtaagagacagaattgattagggaaatgaggcagattcactaaactccactgaaggatggacctgagccaacagttcacaggaaaatgacacaaaaggcctttaaatatataaaaagcatcatgtttaaagcttcacttgtcatcatgggaagtcaaactaaaacactgaattactatactttgtccaccagatgagtgaggatcaaattttgaagatgtactgtcttagtaagaggtttaggaaattggtattttccttctgtactgatgagaatggggacttcttgacaaaatctatcttaagtacaattccacatgccctttgatctaaacacaatattttaggagtctatcctatgatgatacaaagtaatataagaatgtttattgcaataacttccaataacaagctaccgaaaccagcctaaacaaccaaaaacagattaaatgagtagagattggttaaataaattatggtacattcacaatgaaatcttacactgctgttaaaaagtattaatttttcctaaagatatattaaatacatataattaaaaatagaaagaagactagcattagacaaaagctagagaagtagggaaagtacatatatttttgcgtattcctagagaatttctagaagcatatacaggaaacttaacaatcgtgagagagtttggagaggactttggctgggggttctggagtggtgcagagatttattttcaccacttactcttttgtactacttgattttctagaagcatatgcaagatgaatttctagaagcatatacaagaaacttaataactgtgagagagtttggagaggactttggctggggtctctagagtggtgcagagatttattttcaccatttactcttttgtactacttgatttttatcaagtgcgtgcattacttttttgccttttaggtttttattttatgcatgtttagacttttaaattttcaaataatcatagattgacaagaatttgtgaaggggtcccaatatccttcacccagtttctccactgtttacgttttacattctacaaaacaatatcaaaacaaagaaactgacattagcacaatgtgtgttcttctattacattgtatcacatgtgtagattcctgtaaccaccaagacacaaaactatcccatcatcccaagatctctcctgctacctctttgtagtcacacttccccaccaccgcctctaacgcctgccaaccactaatctgttttcactgtttataattttgcccctggaagaatgttatacaagtgaaatcgtacagtatgtgactttttgagattggtttttttcacttagcctaatgctcttgagatccatccatttagttatttgcatgaataatgtttctttttattgctgaatattggcatagatgtgtcacttagtttaagcattcacttagtgagggacattttggttcttttctagtttctggctatgataggaagacacaggagaaaatcatctggacctaggagttgaggatgagttcataggcatggcacccaagtacgattcattaaagaaagaattgataaattggacttcatcaaaattaaaaactttgcctctgcaaaatattctgttaagatgatgaaaggacaagctatggaggggagaaaatatttgcaaactgcatatctgacaaaggactcacatttacaatgcataaagagctctcaaaactcaacagtaaaaaaaaaaatctgataagaaattgggcaatagacatgaagagacatttcatggccgagtcaaatcagcatgtggaaatatatttaacatcattagcctttggggaaatgcaaattgagatcatgagaaatcactgcacacttatttgagcagttgaaacaaaaatataatgataaaaccaaatgctagcaaggatgcagagaaaccaaatttctcatcccttgcttgtgagaatataacatgatacacacagccactcccaaaaatagattgacagtttctcaaaaaacatgcacttaccatattactcaacaatcacattcctgggcttttatcagagaaattataatttaagtttgcacaaaaagctacacacaaatgctcataactgctctattcgtcatgtttttattggcaggtaatttacatacaaagaaattcaaaaatcttaaatttcacaattcaatgtgttttgtcaaatgcctgcactcctgtccctcccccactgtaagatttacaacactctagcacccccaaaaagttatttcatgcccccttcagctaacctctaccatgccactccatccataaaccccaaagcaactattaaaaaaaaaaaaggcaaaaaacgcaattactttcgcaccaacctaatactagtctgatttttaaatcacagattcattttcatataaatggaatcatacaatgtttattctttcatacctgacttctttcattcaggaacacgattcagagcttctgctgtgcagtagggggcatcagtagttcattttctttttattgtctgctaacattccattgtatggattcaacctagtctgtttattcattcttcttactgatgaagttttttttttctcacggcttaagtccaaggtgtgtctttttcatccagccaggtggccccggcaggtcgctcctcagggacccacatgggtcagggcggtgcagcagtgacccacaggggccagtgcagttgaagtggctttgaaacctgattggagaaacagactgctcagctgttaagaacacacagcgctccagaaaactggtgttcaacacaacgcgtcactccggcttccactgctgctgcggagagtcaggttctccggcaaggccccgcgcgcccgcccccgcgcgcccgcttctctgtccagggaacgcctttctgcggccggaggcggctacgagggggcgctgcgaaagcggatttccaggcacgcctggcgccactaagcggcgctgagacggcgctgcctcctgactgccggttggaggctacaggggctctggggcaagggccgcttttaggagtttgctggtcacgaggggggacgcgacctcgtccaagatctgtctgcaagggacccttcccagccgatgtgaacacagcccggggaaaggggccgtccggggagcacaggcagcccgggaagaggagtaggggctgaaaccaaaggcagcctgggtacccaggttttcccaggggacaagtcccccggttagctgggcacagggaggcatggagagcggcagcaactgcgttgggatggggcggctgccccaggttggggcggtgacccatgttccaccaggccaggcgcagggctgaggtggccgactcctgtttcacaagtgaagacctggttaccccagcagcaaggcattccggagtgggagaattcctgagtcctggggaggaagccgtggttacagggctgtggccctgagcaggagctggctggcccagcagggtgggccaagcacttcagtcaaggctgagcgccaggcaccagggactcaggtctgagagacctgatgtacatcctgctccagagcagatcacagagatgtgcccgcatgaatccccaggctaagcccagaattccgtggaagatgcccatgggccaggaacacgggtagtcaccgcgctagggcatcacacagggccccccttggccaaataccacgagggaacttagacacctgcatggggccatggaagtgcctgcaacctcacactcaggcctagggcttaccgaggtattgcagatatttgtgttctcagagtaggagcttaggaatcagtatcttctcttcactacagggacagagatgcagtggcctaggacacatcacaaatatttaaaacgatgtccttggtcaaggacagaggtagccaaggccagccttctcccaggaaactaacccaggaccccaaagcacagagctgttaggtgggagggaattggtctgtatgtctccctatagtgttgcaacacttcggcgctgggctccctgtcccagactcaccttccatactcaagccagaggcctacgaaagccgggttaagatcttcccctgcctgtccctgtaaagcttccccactgtctctggaaatcgtttgagcttcttagccccacagcatgagcccgctctgactcaggccctgacaagctctttctcttctgtctctccctcctctgttgatatggacacaccattcctttggcatgtctagtacagaccagatcccctgctgttgttagcattcctccctctccctggaatgttcttccttatctgtctacctgataagcactgagtcatcctgcaaaactctgcacagctttcaccttccctgaggagcctcccctggccagccccaccctgttgcaggcagaatgcttggcggtgggttgctgaccacaaatccattccccctttattccttgccaagggaatgctgattttgctcaggttgtcaaccctcagggaggtgaccctaaacatgccaagtccaacacactagctctaccccctgagagcatgagaacaacacggatgggcatgtgcccggatctggctttgccctcatggactgcaggtcaggggtgggaagctcttatagagcagccccaggagccctaggggccatcctgctggccatgccatggcagtgtcagaaccccaaacagcacctggggtgaaggagctactgaaagagtggagagactccactttgtcctgttagatctgtctcagaagtatttttattaggattgactgggtaagctttcttccacagggagcctaagggggcccagagattcttctcagaattggaggccatcaaggattggctcaggctcgctggctactaggctctcctgttcccaaagtccatactcttgtttgttgttattcaaaaatatttgttgaaagcctgctatctactaggccctgaatgtttaaaaacaaataaagttcctgccttcaaggggctcacagcttttctgagaggacacgtaaacagataaaatgtcattagggtgtagttctgtgtaatagagggtgttcttaggtgctgacaagagcatctactctgtagtttaagcagaaaacaaatgtatgaaaggctattggacggctcacagaattctgtgcggcacgaacactgtgtctcaaatcatgctgcaggacaaacttggggctcagtatgctggaccatgttgtgccttctctcccagccagtgctgcaatggaagaaaaggaattcagctcctaggaaatgcaaaacattgatctgaggatagagaaggagtatatgtagatatcatctcttggagggaattaaaaagcaacgatgatagagctatggcaaggctacaggtagggaatacctatggcaaagaaaaaccagagctagacgataaagtagtaaaaccagattttattcaggactattgcaataagcgaaaagagacctcaatatacagtcaggctcattctaaaaacagcatgagaagttgagacttggagccatggagcaggtaggagttgaaagatggaaaattaccaagaggaaatgccaggggtgagggtgatgttggctaaactgacctaacaggagacctgctgaagaaaggccagggtgaccagacatcacctgggaaggtggaggatgaggaccctgatcggatattgggagtggtcagataggaacaaggggagttcttgctgaattgacttagtgggattcttgctcaaattggattttacaagaaagtacacagatgagcctagaaggttcaggagcctgactcaagtttgctcaagcaaagaaactttgtcactattcccttatttttcccctatgctgaaattaaactgggcagactccaaattatctttaaaaacataggtgtgtttttaacaaattccaaagagcaattgcaaaagcacctgtggagcgtgtctgctttaccagaagtgcccaaaaggttactccagcaaaaatgattagcaggtgctgtggatgctgctggtgtcctggccagggcccctttgcttccttccccaggtgccatgggggtcacctggtgggagtcagcacatggggccgtgaccccttacacccatgctgctccagctctgaccccaggcagagagagcttcccctctaatctgaggagacctcttgcttccaggcctgtcccacatttctctgctggcagggaggcagtgggggtgatgtccattctgccccatcaggggagatgatcaacttcatgactctgcttaagcagatccccttgctgggcatgtacttggacttgaccaaatttccttggctgcagctcttctcaaggctcctgtttggccacatgaggcctgttttggggtgggctgcaaaagaacccatcgaaccagtggtcaggggagcttgcagggcagagagatcctctaagtccttccttccttccttcctttctttcttctttcttttttctttttttttttttttttgacagagtctcgctctgtcacccaggctggagtgcagtggcactatctctgctcactgcaatctctgcctcccgggttcacgccattctcctgcctcagcctcccgagtaagctgggactacaggggcccaccaccatgcccagctaatttttttgtattttttagtagagacagggtttcaccgtgttagccaggatggcctcgatctcctgacctcgtgatctgcccgcctcgttctcccaaagtgctgggattacagactgagccaccacgcctggcccctctaagtcctttctaaagagctttggcagaaagcagctaggcaatggctcagaagtgaaagcaagtctgcacacaaagcaggacttgaactgaaagaaaaggaataagaattctcacccagggctgggatccaagagacgcacactgatacaactactaaaaggttgttaaactcccgaagggcccctgccttgctgtgttatagtctgattgtgtattgttgaagcccttacccccagtttgctggtgtttggagatgagcctttggaagctaattagggttagatgaggttatgagggcggggccctcatgatggtatagtgatcttatgaaaagagcaggagagagagagagagctcttccccccgtgaacacgtgtaagcacagaggaaaggtcatgggaggacgtgtcaaaaaggcagccgtccgcaagccaggaagaggccctccccaggaactgaattgatcttagacttcccagcctccagaactgtgcaaaataagtgtctgttatttaagccacctatttatggtattttgtatgtcagtctgaaaagactaagacatgttggtgaatagctgctgcacccccaacacccaggagcctcccctggggccccacagacaccctgccatccagcactaagggttgaggcctggccctgcaggggccgatactcgagctctgctccacccctgcagacagcagccattcaggtgagtgggttgtgctgcaccagttgttaaatattctgagcaccacttgtggtggatttaaaaacagcccccagattcgttgacactcttctcattgacagattgggtctgtgtcccctttccttgaagctggggtggcttgtggtgtcttcaactgatagggcaccggggaagtgatgccatgtgactcctgacgctaactcacagaaggcaatgtggtgtccttcttgtccactgggagacggtggagccctaccacttgctaccctgaggccaccatgctggagaagctacgtgtaggagcgcaggggacagtcccagttgagcctggccttccagccatctcaccaggggcccaacatgtgagtgaagaggcatccagatggttgcacccctctgccctagagtcaccccaaccttcaggtcttcccaactgagactgagtcgtcttacttgttgggtcagagacaagcaccttgctgtgccctccagaactgctgacccacagaatctgtgaacattatacatgaggattttatgctactggctctggggtggttcgaaaggcagcagttgtaactgggagcccaccctgtatagaaatgtgaggaaactgaggctcagagagagagtaagtgactcagtcactgatatagtttggatatcccctccaaatttcatgttgaaatgtgatccccagtgttggaggtggggcctggtgggaggtgtttaggtcagggggcggatccctcatggcctgatgctgtcctcaccatcttgagctctgacaggatctggctgtttaaaagtgtgtggcacctccccccacctctcttgctcccactctcgctacgtgatgttggctcccccttcaccttctgccatgactgtaaggtccctccagaggcctccccagaagctgagcagatgccggcaccatgcttcctatatagcctgcaggactgtgagccaattaaaccccctttttaaataaattacccagactcaggtattgctttatggcaacacaagaatagcctaacacagtcaaagtcatggagctggtgcagggcagagccagaatctgcctcccgtccaagtgaattcagagcccacgctattcccatctccctgatcaggctggttcctgggcacacgcttacccctcagggccacttgaggggaagtttgcaaactggagcatgttcaggggtgatggccccaaacaggctccaggagggaccactgaagggactggggacactgggctttgacagaggtcatcacagaatttgtgggccttcttcagatatccaaaatgttgttactgggagggaataagtgttgtggccctagatggcagaggtgtgggcttgatgcggctgattttggttcaggtaaagcaagaactttgctggtcacatccattggaaaaagattgggctgtcaaaggacgcagtgagtcccatctttggaggcagccaagtgcacccggagtactcaactgcaccctgagtatcaccagtacaccctgagtacccaagtgcaccccaagcacaccaaggaccacccctgggtggatgccaagggggtagtcaggccacaggttggaacagcaccagctgactttaaatccctctctaaccccgagatacaaggatgtagcctacacatcaggaggtgaatagaatctaccctcatttgcaagagttgtccccagggcagcggtggctgcagcccatccagtgttcccactgggagatgcccacgaggtgctcaggtacagcccatccagtgttcccactgggagatgcccacgaggcgctcaggcttcgtggctccccaaagctctgtttctgacaaattaaattggtcctacactggtccctgctaaacatccaaagatactttgagttgaatacaaatctttattattttgaaaaccacagcaaaggcacttcagaatctccaggtacccagtctcagttgccgttcagtggggacaagagtggtgctgagggcatggtcacacccttctgtgctgcatgcagaggggtgcaaggccagggcagctgacctggtcagccaccaggggagcccacgcctcttataacacagtgtccttgggtcaggaatttgtagtttattttgttattaagatggcgagagaatttttcgtccatttagagcctaacatttttagatgaatgttaatggcatctcggttgggatggattcgtgttcgtttctcagctgctgaaggatgtgtgttctaaaacaaaagggctcccagccagctctccggctgcatgatagagaagtgttttgtaagacgcttgttaaaaacccatattccctggcccctcttgtggagaccctgtttcagtagatgggaatggggctggggtctgtataacctgtgcccaggagactctgtgaccagcttgggaagctcctgcagggaggaaggaatgatccacaagtccccaagcccttcatgctgaggcatctgtctggctggagaaacactaaggttggcattgtgctcacactgggaaatgacctggaggaagttgggaagaggagtccaggccggttccaccctctgggtcagaaacccggctggaaagcactggaaatagggaaatagaagactgaaaggctgggacccccctcacacccaacctgcgtccatggccgaggttgagtgaggagtcctggagactctggcttcatggtctttgctcttgttcttctgtgcctcaggggtcgctgcccaccaggctcagcagggcgttcttgtagtcgccgctggtgtcttcctgtgggcaggaggcgcataagcgtgagaaggggtttgcttgtgcctggctcggcagtggcggctgtgttattatgactaagaggtgtgcccctggcctgcacctggcccggccctccagggttcctagccgcaggggttgtgccatcacccctctttcctggtttttaatttcaggctattcctttacatttccttttgattctcttaccaactacatgcaggattgatgtggaaaatgaatcagagacagttccactcctaaacaaggaaggggtcagctgtcccagggttcttctattcgggagccagggtgcccagccattcatttacacaacacgatgcatcattattcaacacctgctgtggcagcttgggaatcaaggctgagagtgaggcatcagcacacacctgggggcagggccgggggtggagggagcctggatcatcgcaccctgacggtgtggccgaggcaagccccttcacctctgtgggactcatctatgaaatgagatcgatgctgtgctgctgtgcatcttgctgagacgtggtgagggtacagcaggaggaaggcgagctggtctgccctgcatctggctcacatcgggtccacagtgtttgtctcctgatgagactgaccttgtggtccgatgactgaggagccctgtttcttagatactggtaggtcctgatgggactggctagtccggggtctgcatacagagctgggaaatgggccaggtcagatcacccagattcttcttcatgcagttgaggacagcggggccaagagaggggagtgaattcattcacaacggcatggtgagtaaggggtagactggggctagacccactttccacactctggaccagtttaggtctcatggttattgtctacttttcaccatttagtaaaatttgcctgctttgagcctgaaatctcattacgggtttcaaactacaatgaaatttttttaactttttcctttctagacacggtctcactctgtcacccaggctggagtgcagtgatgcagtcctagctcacggcagccttggactcctgggctcaagcgatcctcctgcgttggcctcccaaagcactgggattacaggtgtgggccactacgcctggtgatttttattattttgaagacaatttttctaatagtttttagaaagaaaagcattaattttgtttactttttcaaatacatgagttatacttggagtgtttatacatttgcctcttaatttcaatgcaggagtttttaactcatattagtgttgaaaaccatttttgctttaatgacatctgtggtctacactaaaaagaaacgtttggtcaatgtattcatgattctaactcaattttcttaagtaacaacattagataaaatttgaagagggtggcttcatgtatctgtagaaatctctctgatgccgtaagttaccatgtgtggttaaaagggttaatgacaatcagctcagactgtctgcaggtgacagcacagtccaggctggtgtgtgccttgccctcctgtctcccgacaagattggctggggagcctcaagtgaaaccaagaataattccaatcctctcttgcccctgcccacctgtttcaagatgttgccatcttgaaacatctggaaacagaaatgtcttttccacctattgtcagctatgtgtttcttgaaaagtgcacttaacaacgacatttgcagaagagctagagacttgacttagtagccaaagaaaacttggggatacatttgtcctaatgtgacttctgctaatgaaatcatcaagacctcaatttgcagacacccccagaagagctgtttctcccaattatcgcagcgtgataatcagtctgtgttttgaaggctccagaacttttgctaattggaatctggttagatagtctattggcgctcatctgacttatctccttagaagttggccgccaggactacttaaatctggatttgagcggtgggcccgattcctaccggactagttcatctcattgactattcagaggtggcttcttctgcaaggatttggtgtcttttccaaggagcaaccataacttaaatgtgaaaccaactttctgagtgggacacaggggagcctctgtgccctggtctctgcatctcccctctgccccccattccccttgggatccagccacactgacctctgctgttccctgcacacaccacatggtcatgaatgcaagcacatggtgcccactgggaagggaggggctcacgtagtgttggccacagcctccaggtttccctgaatgtctgggtttcaggctggcctcagcattgggaatgcctgcttaccatgatcatgctgctgagggtcttgccgtacatcttcttgaagtgacatttgataagatttaagtcaatctcgctccttgaaacgatgtttcttatcagggtcccatcacgcgtccctgctccctgggcaagacagcagccatcaacaatcctgcctcacctttcctgtccatctctgagtgatggacggatctgtgtggttgggttctggggcttttagagggagggagatgtgggaaggagcctgtgcttcagccagggaagcattaggagggaagctttggtggcttagggtgtccactcccttaattccttctcacccactgcccagaactcttcctttatgatgccaagtgctccaaactgcagtatgtttggtttgccacatcagattctagacacaaaatactcactgctccaggaacaagacttcctactagagcaatggcagcaatcagctcagccaggaatttcacaggcagggccttcctgctcaccttcatccctgaccagtctcatgtcagctggggccacatggccaagggaatcgcatgccctctctcatttcctgggcagaagtggccagagggcttgggtttcgggtgtggaactaacttcaggggatatcagcaaccatcaatcagagaaaacgggcaatggttttagtttcagggaattattcacctctggagatgcagcgtccctttcccagactcaatttcacctccgagaactaaaacctttctgatccacgacaggtttgggtaagataactcccccgtgtggaggatcgtggtggctttgagctccttggctttgcacttggtgctatgtagggtgagcgtcaggaagaagaagacaggacagttaccttcatggcatagtagagtctctctgcaaagtagctgtggaggttttgggtgcatttcactggcaaacaagaaagctgtgttaatgtctggagctggtaggtggcactgcctacaactttatgtcttgccttaggtcttaagagtcagtgttgtgcaaggcttggcatatttctttgttccgtgcctttcccaatgtgagaggctttgtgtcaggtggcgtgggacagggaaggtagcccggggcactgggcacagctccaaaggcccaagcaggcaggcaaaagggtaagatgtgaaatgcaccagactgtggggctcgtctgaagacaccagctcaagcccatccaagggcagctcagactcaggacaggccctgggctctcaacccagagacacctccaccaaaaatccagcctctcagctccacagaagcaccatgggatggtggctgctggcctcagagtgccctctctctcacacttatcagcaggaaccctgcattttgaattcccatgtgacaagtggagtttggccccacaggactaaggcacctgggggcgtctggtccagagactgggcccatgcttgctcccatgggtactgctcagagacttggcatctgggtggggaaggttggcattttcacttagggctgcagaaggagcatgggctttgagtgaggtaggcatgtgttcacttcctgccttgatggtgcagtatggcttcattactcaacctccctgactcatctgggaagtgagactgatgcgaggcttcaaggtgaagtgaataggaaggcccagcatgacggagcactgcatggcttcactattccctgctggcagacttcattcttggtgggttcaggccagatccaggggtggaagctgagattggagcaggggtgtgattagatgtcctgacatagaccggattgtatcacagcatccaaggccagctggggtgtctcagatggccctgtccacccagagaggctaggaaacagcagggagcctgctggctgctggctttgcacggaggcagcctggtgtggaggtgagagctgcaggccaggagtccggacctgggctctgtgtgtaagtgggagaagagacgtccctctgccctgggcctcagctctttactctgcagtgactcttcccattgtgatctcagccctggaacccatgagagctctggagtgggtcctcctgagtggccctgacttcctgctgtggggaagatccccagtgtttctcagcatcagaccatccgtcactcagtttggactcaagccacacatcactgtttcttcaactggcaatgaaggcaggggccaggcccctggttcatgtccagaaagatgactttgtgctggccagggcttcacaaccacagccagagtgctccctgcatggctgccatgagtacacacagggttggggctggcataatcactggcgtatgcatttgtgtgcgcacacacacacactgtctgtctcacacacacacactcacattccacccacagtcatgcacacacaccctcaggcacacacactctcacgcacacacacactcatgcagacacacccacacagcactgggcaccacgtgggcagcacagagaacaatctttggcagcacacactgggactctagaggtggagcagtccctgggtgagggagacaggcagagtgtgagtcggggggacatcccgtgaaggtgacacagggattctttctcttgtggtcgcatccctaggccctttgttctttggtgctgccccacggtgagccctgtggcctgaaaaacgtgcaagtctgagctcttacccacagtgagcatggcctcctccagtgagccatgggtctcactcttgatgctgtcctcaatgctcttgttggcaattttctcatactcttcaaacactgtggagagggctctgctcaggggatggtcagacctcctcgtgatgcccctcagtgtctcggatcagagatcgcacatcaatttgccgccctgacctcccactggtggctggggaaacagtcctgggctccctggctctctccctaactctagacttgacaaggcagaagcacgagggagaggctcatggccaggacaccccctgtggccccggccccagcccctccctccctggtacctctcagcaggtgagtggcactgcgcgtgcacaggatggtgatgaatttcatctcatcagtcccacgaatcttctcgcctgccgcatacagatcctagcattgggacacccacaataagccagtgagggagaccagggaggtgagggactgagccccagagtcccagagctgtggccatggcctggccctgtccactctgccaggccagcatgctcccctgcttggtcgtctctgacagggagctcccctttctctagcagctctggcttagaatattttctctatcctgggccacaagctgctctaggaactgcctggtccccagacttccctctgccagcaggcagacctacagagacccggacacctgtgtccagcactggggcctagcgcccccgggttcatgggctgttcctgccaggacagagctttagtgctcccccacccccaagtcacactccttcctcccgagtctcccaacaccctcactctcctccccagacaccacaggacaaaggcctatagggagctgagctgggtgggtcccagcccagtgtcagagaaagcccccgtgggcagaggagccggagtccagatggcagggggtggggccacatggccggctgggcgcagcctcacctgtgcgtcttggagggccagtcctgggtccacaaagctgctcacatcatccctgctgccctaggaacagaggaggtggctctgtaaggcaggccagctgaccagagcattaagggcacaggggggatcctgggcttggagggcaggcatggctctgctgctctttggctgtggaaacttcgacaagccagttattctcttcagcccttggtttcctcatttgtacaatgggggtggtaaggactgcctcataaggcttggcggattcagtgagctaaggtaagcaaagtgcctggcatgaggcctgcacgaaggacctgctctcctcccgcttccaggatgctctcacatggctgagtaaggacaggtgtgggggctctgcagttgggaccctctaaccatgctgagacacacccaatgagccctggctgctgggctatcccatgcccctaccctgactcttgtggcgctattcaagggctgctccctggggtggagctgttgggactcccaaaccaaggcactcccaagagcctaggctgtgacacctgcaggaggcacaccaggatcctctccaggtagccacttgtgtctgcttggatgtcctcctccaggctggacccatagtctgcagggaaacaggaccatgaggcacaagcagaggcccacagcctacccggggcctgctttcctccttccagccctgttccccatacttctccttattaaagccttctaggaaagaaagtccttggcacagggcatggatgcaatgcccgggtgtccaagtggctgtcgcctgggtggtgcttcacaactagaagcgacatgcgtacccaaccaagctcaaagcacaagatggaccaggtcagagagccaggctaggggctgccaaccaagctccatttcatctcaaggcttggcaaagccaaagcctccaggaaaactccccactaggtacatgatgtggaggactgactggcctctgctagcctggggtccacaccccctactaccacagtcctcaagggcagagattttagttggtcacaggcctctctcccctgtaagaggagctggtgagcttacagatcaagtctgaatcatgttcagtgtcaccatcaggcacagatcttggcatacggtaggtgctcagcacctgtgggtaaaaaagtccccaaagggtcctttctagtgtggcccaggttaattcttgatccttgttccctgccaggctgccaaagcttgtggccactcctgagcccctccatctgtgccaccccttaccttcctcatacgccttcattatctcccgcagctggttcttggtccgagaggccaggatctcaatgatgacaccctccttggttcctaagccctgtggacagaaacctctgcctgctggagtgctctgccatgaccttctgctctgtccacaccttcttttctcaagatgcctgagcctcaggaaggacctcactgccctgccccacttgaagtgggaggatgtgatgagaaaatcacatgcttcagtgatgaacattgagggcaagtgctgtgacggggaagccctgtctcagctctccctccttagctgggtggtctcagacaggctgctccatgtcctggagcctaagcatcccgatccataaacaggaataagaagcctcccctgcgccaaagatagattagggagcgtgggtgtaaaatgcctggcagtgcccatgcagcaagtgtctttccaaacaaaatgactatagttactgggtccccatccttattaatctgcaaaagcaaagagtagtgagaggtaaagggaaacccaaggggctgtgcctgggactgtagaggtgggtttccaataccactgtacacctgagctcgtgaggttctgagaagtactgattttggcttcatcacggccactcaacgtgtcaatcaggcaccagtgactccaggtgttgggtgcagtctgagcagcaggctgcctgctcactgggcccagttatggcccatatggccattccaaacagtggctcaaggggagctctgggctgtaggttcccggtccccgcattgcccctacccagtcatgtgagcacccctgccactcccctgccctgtctgcctggttaccttcatggcgtcatgcagctccttggcttcgtatctgtatggcgggtacataagggccacaatgagcctctcaaacttgccactgagctcagacttcaaggtctcagtgaggtcctaatgcgggaacagggaaaggtgatatttgtcataagccaggcccacctgagtgcaggcagcggagtggtggctgggtccaggggcttgggctggattctgcgtgggccttgccacgtgctggctgggtttcttgggccagctccttagcttctcttagcatcagtatctttaccggttacacggagagaaacgtgctcctgcttcatcccgttgcttagggggttgtgtgtgactcaattcagcattcagtgcagtgctgggcacatcataagctctcagtaaaatgaaattggtattgctagctagactgcaagctctgagtatggcatcaccataaaatacctgtcacttggcactcaatgaatgaatgcatgcctgaattaaagacttcgtctcacatgtgcctccttctaaggtcacatgttgctacgaggagccaccaggctacatcagctgatctacagagcagcagagagatcaagggctttgtcagacctggattttaatccccaccttgttgattacaggctctgggaccttgggcaacttaaaacctctctgagtgccagtttccccaaatgtttgaatacaaagaatgtatcactgtgaggactaagagagggaaactgtaaaaatgcatactgggttctccaagagaatatttgagctgatcttccttcgttacatctccaaactaatgatatgagtcactagaggcttgaggcaaccatggctgtgcacatatttaatcctgtgtttactgtgtacccccaaatgtcaggctttgtcctaggggtggagtgcaggtgggaggagaaacaaagggcctggcatgcttactccaggctcttagaattcccaggtggcagaagggacgaggtgtgggtgcaagcagctcgactgaggaaagcatgcccacgccccagaacagagcaaagccaggcctgcatgcctggggcatggaaaagagaaggtggtctgggctcagagggcagggcgagatagcctgggggcagggagacagacctccagtggggcctgttgggtgcatgagaaggaatgctgtgagagaggaggcaggaaaggaagcaaggaaggccagcccccggcccgggctctgacacctaaaagtagatctgccagataaaacacagggcagccagttacatttgaatttcaataaagaacaattgttttcatgcaaacaggttccatgtgcccatgctgccagtgggctggctctaggggaaagtcgtccagaatggagctgcctcccaggctgtacccccaaccccaaggctcacctatccccacccccaccagccttccccttgccttgccgaactgagccttgaaggacttggcgatctgctgccgctgcgtgttgcttctcttggtgagcacatcgatgatagcctgctcgttggtccctgcagggttacagcacaagtgaccctgctgcccccagggtgacacactggtgagggcggaggaggggaaggcgaaggcagctgcttggtggctgagcagttgggacccgacacctggatagttccaaacccccagaccattttcgtggtgtaaacaagacccttaggaaatctgcctccccatttcccaccccacacccccacaatgttggggcgtgcccaaggccagcctcacaagatggaatctgaggtctgggtggctctggacatcagcccgggcctttggagcttggccgagtgagatctctggccctgccctcctttgtgttggtcgcagtaggggaaggtcaagactaagagtccaacccctgaatccgaggcctggcccagcaactgcgtggcattgggcagccagcctcatttccctgggcctccgttttctcatttgggaagtggagataactttctgcttcacagaaagcagagggcatgagaacgttttctgggcttgtcaggagcggcagttctcattaaggcccctgatcctcaggcagagccggctaaggggtcagtcccacctggggtgaggtcagggtacatgctctgctctcaggtcaggagggctttctgggcaagctgtttaaatctggcctcaggccagccctcgcccactcacggtagtgctgagggcagcactgggcaagtgcaggagatgggaagggagccggctccatggccatcgacatggggcaagggggccttgaatcagccccacaaactcccaacacctcacacccctggcagctctgtgcctggcatcataaagcaccacccccttcacacttcatgtgacacacaaggccaagaattcttggggccactttacaagtgagaaagctgagactgatgggaagtcactcacagagacacacagctcacctccccacccccattacccagggaagagcagcaccctcctgtccagtcttgcagggtgggtgctgacctcactgcagaaacagagggctgtgtgattctctgggtagtggaatcagtttcagagtatcatgggacaccccagctccccagatgtcccctggcacccgctttccagggctgtgagcggaggggtcttgagcagaggtggcaaggctgccaacacccactcaccgatccccttcatggcttggtagagggtctctgcatcagggtctgggttgaagtgggagctgctcttcactgtgacaccctcctgttcaatctgcaagagaaccaggcctgctcaaagcaggcagggacagggagggcagagcaggctcccagcccatctggtagcccgccctgacagggtgagccccttccctgggcacggagatctgctcagcccttgcaggccagtgctctgcccttcagccccttggccaacagggtggagtagccagagccagagcttgtggggagaagccacaaaacctttcctgtccctgtctgtgccatctgactgcagacagcagccccagccacacccagctccttccagcatcacccaccagcagcaggaagggacaaactcacccaaagttaggaggggaaagaacactgaagcaaaggcttcctggagctgcatgcaccaccttcagagtgtgcagatgaggttggaaggctgagcatggttctgcctttctgaggaatggtttgagctcagtctgccctcttcctggggagttgggacttacagcaacttagagggcaggggcccagctgagcatattgatagttcagggtgtttgcaagtccacaggcccatggggctcagagcgtcaggtttagaaaaacccgcacgatgctctgcagattgtgaaataaaccagataaccaagtgcctgagcccttgatttccaagcctccagttcagggcttgcctgaaggctctttaaacttgtgccctgcagaatttctcagatgattaacatggacataagtgtgttttgggtggaggaatggtagagaatggagggatattggagataggtattgaattagagggagactcagagatcctccaggatgaaaaagagtttagtcccatccagtcttgtcttccatttacctgttcacttattccttccatcacctccatcatctgcccatctactttcccacctacgcacttacccatttgactaccacatccatccatccatccacccacccatccatctatgcacccgcccatccatccatccatccatccatccatccatccatccatccatcgaagccctgggttagattgtgaaaatacagagattccaatggatggtatatctgtaagtatctttcctttgagtaagaggtaaggcatctttctgaactctttgctttaatttcaaatgtctggtgacagatcttcctgagtcatttcttagcaccatgtttcacagcagaaattgttagaaataattcctatggaaattccatccagagagagccagtgtggtcccagatattgctcatcggtgtccacacacacgatatcccttgcttgtggagtcacgctctgctattactcctgttagcacttcaagccccttgtgtgtgccagacctgggccaggtgctttagaagcaatgcttatgtcatggcttcctcaacagttgtgctaggtaagtactgatgcctcactttacagaaagggagctggactcccttacacagctagtaagtgatgctgttgggactccccagcctgactcagaagctgagctctatctacctcccctgccctactgatgactccacctttcccagacaatgagtgttcctggaacgttccactgaaggaagcttcacccacaggaacgcaggtcatctgggaatgtgggaggcatctcagctctcagtgcctgccggcttccctctgccccagcactcgggggctgtggtgcaccagcgagtggccaggctgtgtaaccgcatccctgaggagcatgcagtcccgcaggggtgcggtaggtctcaggtgcagcatttgtaagcagctccctggctggttctgattttgctgcattgagaagcctctgtctcacttcccactctaaggttttagaaaataagtgttctgggaatcggagccctggctatcagtgtggagtcctggagctccagacctcctgctgagaaggaagggtcagcctcaggctcctgcagggtcttgcccagggccgtgctagtccagacaggcacattttcactgaaaaggtgactcagaccagcctgtgactacatctattaatataacttgttctgtgacaggcacaggggagctgccacgccttggccttcccctgctacgtggctgcccagaggcctgggagatgggtttgtctctatgagagacacagaggaaaaggcaacaccaaaaagagaggtgcagatggaccctgcctgcagacagatctctctccagtggctccctcatctcctcccatcgcgttcctggcccagctttgtgcctagaggacactgggtcttcgctagcagctcagctgttgcaggtggggtctacctgtgaacttgctacccctagccagctctcacatggggtatggacgaccagggtatggttttggccctggagtcaggctgttcagattctcacctagactctcacacttactagtgagttcgggcacctgcctagcctacttgtgcctcagtttcctcatctgtggataaggatactggtgtctacttcatagactccttgtgaggttcaagggagatattgaatgtgaggtgcttagagaagggtccggccacagagtagggactcagtgagtgtcacagtgatcctgtcaatttggcaggtccctacatggacagccctttgtcctgctgcactgggtgcaaggcccagtgccagactgccttggccagcaactgactttggaaaccacccagcactgggctctccctgccatgtccacctcctcaaaggcaggttcccagcagtctggttgaagctgcaggcctccatggccccttgtcctggaagaaggctgcttccctgggggccaggacagctgccccacctcagcctggcttcctctttgtcccacctgtccagaacctagcatgtctgaccctgaggacacttgcttgggttgcgacatctatgatccagagactccctgaagctggacaagcctgggtatcccacaaaagctcacagagaacctggggctgggcagagagacccaactgctctctgactggagcctgctggccattggaccctagcaagtcactcagtgtctctgagccttcatttcatcatctgcaaaacagaaagtgcagccctgacatcctgaggctgcctgggaggaaaggaaaagggtgtgcagagccggcagccgggagatgtcacctctgtccccttctggatattcaactccttagcacagcgatggcctcaggctcaaccatagatggaaagctcccgagaacccatcagttctgctggggatgggctgccctgagccccgggttcctccaggctctagcaggccaggtcctcctgcttcccctcttccctctccagtcttgacaaatgaacatcattgatccctgaggtgaaggcattgatgggtccccaacagcaggttcaggttactctcatgctcaaagcccttcagtgccttcccacttctcttaaggtaaagcctaactcctcagcctgccaggcaaggcctttcaggacctggccctgcctgcttccccaggtccatctcctccggtaccaggacccttgagctgtgctgagcagcttccctcgaagccaagctccctgccctctgaccctctgcacacagttccctctgccaggagcagtatgcctgattctccccaaatgcacacgtgtgtgcaccccatacacatttacacacaaggctcaaccatgataccccctcctttgagtggccccacccctgcaagggtccctcccctggactcttctcaaacctcagcttcccccttgcatttctagatttcttcatcagcctgtctcccggcccaggtcccatccctgccgtgggcactctaggcctgggactgtttcttctcggccccttcccaccctccatgcttggcccaggaggcagccaaatgtagactgagccactcccagccaagggcgactttacatttctcaggactccctggtgaccagcacccaacaccatgcaggaacccaaatctcctgccagctcccacttacccaggatttccaccaggccatctctttcacctcgggggcacctttcccagggagatgaagagacacaggttggcctctgctgggactccacacgtctggctcctgcagctgaggagtgagcaggccgctcacttgggtgtgggggtgcaagcccgcccagggcagcgccacacctgcctgccgtcccctcgcccccgggctctgcctggctttgggcatctcctgtggctcccaggccccacccagacactgcccaggcctgctctggggaattacacaactcactggcagatatttgggctgtggctgttacgcatactggaaattcttagctccagcctgcgaaagccccactcagtaaacacagctccatgttgattaggctggtctcaaactcccgacctcaggtgatctgcccaccttggcctaccaaagtgctgggattacaggcatgagccaccgcacccagcccattttcatcactcctaatagccatggagtatgccatttaatcaactgcatatgcaatattattttttttttccgggggcaaggggctcatattcaccacagatgggaggccagttggtgagaaggtggcaggcggcacagccaccttatacagcatgccatactggtccactgtcagaccggtgatggcctcagctccatcaccccccaggctgactctggctcctgcctggctctgcccggccaccacaacccctcgggaccattcagaggcatcactggaggatgtgtggttagtggagcagctggtcatggggaggtctcgtttctttggtggaaggcattcctggttcctctcatgaacaggtttcatattgctttgtggtgttcctggagcctggaaggagttggcttgctccctggggcatcaggaggggcttctctgtagcttctctgaacccctctctgcttctggctggggcacctacatctgagcttccagtggtgcttctgagcagctgtagtaagcgtcctcccggctggctcgggagccagcccatttcaccacgcttcccgggatccacccgctcatcctggagccgctgcaaacctggccgccgccatccccagccccggagctgccccatacccctgtatatgcaatatttgttaaccattcccttttggtgcccatctaggtacaggtatcatttttggagctaaagtatctataatacactggaagtaacagatgtcacctccatattgtacgccaaacctaataagcagagcaaaacttttcatccaagcgatttggttaacattttaggatgtttctaatctctcagtaatacaaatatgctacaatagatctgtgtgtttatcctttgggcacctgtgtgtgcctgtgcatacctggagaataaagtcctgtgagaggaactgccatccaaagagggtgtttcagtctgtactgccaccaacaatgtgcttgtgcttctgagcttgcgtttgggtcaggagaatttgaaagtcatcaggaaccaaaccaggatataaggttcagctgtagctggaaagtggcaagcgttccaaagctaagacattggctatacctgggctgttcacaaactgtgagtccaattctagatgagatccagaagtatggtgagcaactcacttattttttaagcaaaacaccttttcttctcatttctgctaagaacaaatagcttccagcaagagaaataggggatgcaatatttttacaaattacttctcttttttttaattaaaaaatgttaagttaaatgctacttaaagatatgtttaacctctatgatactgacttgctcatgagaaggagagagggccaggcatcttgcccactactacccactatcaacacttaggcctgacatcagtctctaaataaatattctgggccaggtgcggtggctcacgcctgtaatcccagcactttgggaggccaagacaggtggatcatgaggtcaggagatcgagaccatcctggctaacatggtgaaaccccgtctctactaaaaatacaaaaaattagccaggagtggtggcgggcacctgtagtcccagctactggggaggctgaggcaggagaattgtttgaacccaggaggcagaggttacagtgagccaagaacatgccactgcactcctgcctgggcaacagagtgaaactccgtctttaaaaaaaaaaaaaatcaacagcagcttctaggatgatgagcagtgactcagtctctccttgaccagattctgtaaccgtccagcagaaatgcttatctgatctctgcgagaacaggaagcagctcagtgggggccttccttgctaaattcttcatcaagctggtctgttatctgccctgagtcctgcaagaacatctcaagaaaaatcccaaaaacatgcaagacaaatgagggtcctcccttagcatgtcttgaagcactgaggcacctgaaagttgtatatagtttctggtgaaacagttttttaggaaatgaagcacagacactaactattcttccagaagagccccttcctgacatgaaagatcttacttagcatgacagagaagcatctgtttcatcatgaggacctatccaaccagcagcaggggccccagtgccagtgtccacctcagcagaggagacacgggggacatgcaaagtgtttctgttgaaaaatacttcacctagggtgactatagttagcagcaatgtattgtatatttcaaagtagctagaaggctaggtacagtatcccatgcctataatcccagcattttgggaggcccaggcaggcagatcacctgaggtcaggagtttgagaccagcctggctaacatggtgaaaccccatctctactaaaaataaaaacaataaaaaataataataataaaaattagccagagatggtggcctgcgcttgtagtccaagctacttgggaggctgaggcaggagaattgcttgaacctgggaggcagaggttgcagtgagccgagatcacaccattgccctccagcctgggcgacagagcaagactctatctcaaaacaaaaacaaaaacaaaaacaaaaaaacaaagtagctagaagaagggacttgaaatgtacccaacacatagtaataccaaatattcaaggtgatagacaccccaaacaccctgattgatcactattctgtgcatgtaataaatacttaagtgtacaccataaatatgtaaaatatgttatgtcaacaagaaaatactttgcctagtgtttccatccaaatgggaataaatccagcgctcaatgtacacatgtcatggctttttattgagactggggaagggccgtggtagcaggtgcactcactgtccaagtttgtccagactttctgctgcatgggtgatggcatttgtgactgtgttggtcactgtctcggtgatttccttcatctttttgtcccctgactcctgggctttctttatggcttcagcaatggctgttggaaagaggaagaatgtcctagtgatccacctgctgaacttgtgtccccttgagtggcctgtgggatgtggccatcttaatggattagtctctggagtggcccgatgggaccaagggcagcaggattactgcagaatgaatttgaatttggttttaatttccccaacaacttgcatttcttcaactgtgagtgagactgagcatctactcatgggtacattgcctgcttatccttttttctggaaaatgcctgcttatgtcttttgaccatttttatattgggttgttatattggattatcatttttatgacaaatatttttcatcagtgtataatttttcttttggcttggtttatagtgtttttttttttggctatagaaaatttcagttttggattgtcaaatttacttaatatttcctttatggcgctgatttttttgtcatagttctaaagattctcccctctccaagattaggccaaagtctctgatgttattactatgtctaaatgtttacgatgtcttccccctcaaaactcatatgctgaaatcctcagtcttaatgtaatgatattaaggggtggggcctttgggaggttgaaattagcacccacataaaagagaccacggagagctagctccttccaccatgtgaggacagagctgggcccatccatgaaccagaaagactccctcaccagatgccaaatgtgccagtgccttccttgatcttggacttcccatcctccaggagtgtgagaaataaatttctgttgtttctaagtcacccagtttatggtttgtttttgtttttgagacagagtcttgctctgtcacccaggctggagtgcagtggtgcaatctcagctcactgcaacctccgcctcccaggttcaagggagtctcctgcctcagactcctgagtagctgggattacaggcatgtgccaccatgcccagctggtctttgtatttttagtagcaatggggttttaccatattggtcaggctggtctcgaactcctgacctcaggtggcccacccgccttggcttcccgaagggctaggattacaggcgtgagccactgcacctggcctatggtattttataagagcagcctgagctaagatgtttatctcctagtaagttaataaattcatttatgtaaatgtaagtccttcatctacctggaatctattttgttgaaaaggaatgagatatacacatgctttgtacatagtactactcatagctcacacacatcaatttaacatttaacatagaattttacatgttaaatttttttttttttttttttttttttttttttttttgagacagagtatcacactgtcgcccaggctggagtgcagtgtcgcgatctcggctcactgcaagctccaccttccaggttcacgccattctcctgcctcagcctcccgagtagctaggactacaggtgcccgccaccgtgcccagctaattttttgtatttttagtagagatgcggtttcaccgtggtctggatctcctgacctcatgatccgcccacctcagcctcccaaagtgctgggattacaggcgtgagccaccgcccccagcaattatttttttctttttttttgagaccgagtcttgctctgtagcccaggctggagtgcagtggcatgatctaggctcactgcaagctctgcctcccaggtacacaccattctcctgcctcagcctcccaagtagctgggactataggcacccaccaccatgcccggctaatttttatgtatttttagtagagacggggtttcaccgtgttagccaggatggtctcgatctcctgacctcatgatccgccctcctcagcctcccaaagtgctgggattacaggcatgagccaccgcaccctgccatgttaaatgttttgtcccagtgtgctgtcacatagtcttgtgtgactttgtcttcttattccacagagagaaccatctagacagtgtcctaacgcagtacagtctgtggcctctgatgagcatagataactgccccagccaagaggctctgaaaggctgcaacattaggggcagagtttgacctggttagtcaaagaacaggttggcccagcacctagcttcccttcctccctccctccttccctgcccgacctcagccggctgtacctttctctccagtctccttggcatgtcccaccacctccttcaccacttcctccacggcatgaactgaacagaggagacaagtccagggtgagggctcagagcaggccggctgcccccgagtccagggtgagggttcagagcagagccgctgccctcccagtccagggtgagggctcagagcaggcccactgccctcccagtccagggtgagggctcagggctggcttatcctcacaacagacctatacatccctgggcatcctagatggggctctggggtgccacccccagccaggacagactgactcatgagaaggaccttcccccacagctggcttcatttggagacgccagggccttggctgctgggagacgagctcaatgagccccatgagggcatgggtccctgaagccccttggccctgcccggcctggaatggcaatgagcaggcagtcttgccagctgagacatgaagcccaggctgggcctgtgtgccaggtcacacccctctcaggatgtgctagcgcctgcctcaggttggtttccaaagcctcatccactaagaccaggtctctcaaagcaattcctccaacaaaacggaattctctgcctacttcagagttttttaaagtgtgggtggtagcgtgctagaactgaaggatttcagagtcagaagaaatggttcttattctaactctaccttccacctcttggttccctcatctttagaatgggaatctgttgggatgatgagacccaacaccaggtcacgggggcggcaagtccagcggagtcaaaggaatgacaaagagacagttcgagagagaaaatgggagcagggcgctatcgcgagtgtggaggctgcgaaggccccgagttctgggagcccacgctatttattggtgatctaacaaagaaacaggtggtgaggatgtggaggttgaaaggaaacagtgtatcaagtgaatgagaaacatatggctacttgagagaatggcagtgctagaagcaaggagccagcaagtctagcaagccctgcctcagcttttctcccaacgctgagcttttctcccaacaggaatcataaaaaactcagaggctagtgaaaggttaaagcaggtggtccacaccagctgcagagtcaaaaacaaaatacgcatctgctgccatttagaaagaggacacaaactcaggcaagactttttcacacgatgacccatgagtggggcctggctgggcctccccacacatacctgctgacctctgaatacaacatacacttcgggaccaggtgcagtggttcacgcctgtaatcccagcactttgggaggccaagaggaatggatcacttgaggtcaggagtttgagaccagcctggccaaaatggcgaaaccccgtctctgctaaaaatacaaaaattagtcgggcgtggtggtgggtgcctgtaatcccagctactcaggaggctgaggcatgagaatcactttgaacccaggaggcaaaggttacagtgagccgagatcgcaccactacactccagcctgggtgccagagcaagactccatttcaaatacaaatacaaataaaaataaacatgctttaggggacttggatgaaattgaaaatgcccttttagactttgaacagacttggtgacttgttaagaaatctttgaagctttaaagttatggtaaaaataaaaatccatcttccttttcctgcataggttattcagaataggctgttttgacaagaaaggctccccagatttccagagggaagggtccaagctgccagtgttcacccagcaccaggactcatgccctgcccccaggagacctccccaggtctgcacccctcaactccgtgctgacttggtagagcaggagaccagggttcctgaggggccaaggcctccccgcaggtcctcgcctgcctacgtagatccgcctcccacagacccagtctgccccagatccccccagcccaggtagaaaggagccctgggtcctcactggctccctcggtggccttctcggtgcggtgggccaggccctcggcagccagcttccccaggcctcccagcatcgtgtggcagcagacagtggcgaactaggatgctgaggactggcccaacatgcttttatagctgcctctggtgcctatctaggctctggggcaataagccctcaccccagcccagtaggaggctggacaggtgagtcagtgagggcggcagcaggaaggggctgggcggagccaccctggaactagggtggcagcatcccctgacagcatgaggcttctgtaaccctgtcctagggaccccgtgaaggataggggcatggagcagggctggacagtagagatctggacatgcttcttccttgaggcagagggcctgagtgccagcccccctgagaccaaagcttcccaagcctgggtactgatatgtacctggagacaaggcctaggattccaagcctgctgctcaaggtccccagtgtggcctagtaagaggtttgggggttctatgggcctggagacctgggcagtcctttgagtcatgaacacaagtggaatgagggtgactgccctccccattcctggagaccctggctctgcagagcagtttgcggcctccatgggacagggtggggcgttcagggtggtgccttgcccgagtcagaggggggcacagcactgggcagaagcgtagtcacctggtgtcgctcagctgatgctcactcacccaagaggctctgtgaggtcagcagtgccctcctatcccctggcagtcctggaggagtagacagaggcctccaccaccactcagggagatgcttctggccttagctagaatcccctaggaagcagcttccctggctcctggtgcatcgcatgaggagtggcagggctgctccctagttactcatgatggacagacatgcctcaagccacctgccacatgctgcttcccttagtcaccagcccaacctgagcctccgtttcctcatctgtaaaatgggcatagcgtgccttcttggctgtgtccctaatcatccctgaggcaaagcatgcaagctcctggtaaacacctgttccctccactcatcattgaggtgccctttggcagtgagctctgaccaactggtagggtgtgccaaggagtgactgggacgtgaggctgccttggagccagagggctggggaatgtgacttctgctggccaggagccaaggagaggtcttcccatgctcctacttctggggtgcaggcctgtggcaggggtctgaggctctctccccaatgcaggctcctggagctgctctcctggatgtgtcggggcctgattagtttactggactgtgggccctcccagcctgggactcgggagctgagaccctcttgcattcctgcatggtgtttgcgggctccagggctacggccagtccccctagggtggacagtgggtatcgtgggcagcaggacctctgggtctcaagactgtggccccacacatgccattgctgtctcctttgggcaggggtgaatcggggcttcaacaatttagaggggcctctttatgaaaaagaatacaataatatgattcttgcacatttttcatttatatacgtatgaacttctggacccagaaggggctgtgaaagtcgggggcctggagctcaggcgggtccagatgaccctgtcctccttttgtaacagccagagtccaggatgctttgcccagggcattgggctggcactgcagaggcctgggggatggggtgacacctgggacatggctggtgggaattgttctaggaaacctcagggattctccctggacctgtcaaagccccttccctgtttcttctgaggctgtgtgtccccccactcacacaagggtcctttctatgcctgctcccctgataaatgtcatctgcctgctctagaatggcttccagaccccacagaccccctcctcatgagctcccaccctagggtactctccaccagtccccgctttcaggagctcaccagacccagacagcctgttgtcagagctcatccacacagcaggaccctggcccactgcccagcccagagccaggcccaccatggcctctggggacaactgcccttccccccaccccctccacatggtcccctgcccatgagaccctgccctgctaatttaatgcactgccttggtgtgagcactgtgattctaatgacaacacaccatggccttctgggcgaggctgggtccagacacagatcccaaatgcctgctggggagaaggcaagaggcccggggaggcccaggacaagacatgggtcccaggccctggtgccctccctcttggccttccagctgctgctgctgtgaccagattcccattcacccagccccgtccatgggccccagcaagccatctgtgccccacagagggcagacccctaagagtgggacccctttctagccaaagaacatgagatagccccaaatcctcctaaacatgatggatcctggtctgaggggctgggctcaggtgactcctgcagggaacttcacctgcctggatgaggtcaagtgtgaatcaggtggggcctgccctccaccaccccatcatggaagaggtccagcccacagtgggcccaagagggccgcccttggacctagggacccaagtcagcatatcctgagtcagaaggtcaagtccagcctcccctcaggcagggagaatctggctttgacaggagcagataaattctcaaggtggaatttgcccaacatactagtttggcaagggactagctggctgaatcactgagtcaaggacagccaacgtttccaatagcaatttgccaacttagcaattaccaattctgaaaaacaatttgtttatttgaaacacttaaatacttaggctgtctcatgtctgaagcatgatgatgccttgcgtgatttaaaggacagacgtcacgaatgccaagagttttgtggcggtccatcctgccagtgtcttctcccacttttgttctgtggatttgagctcacagtttgtgctgtgcccaccgcctgcccaccctaacgagactcctggagacttggctggccagtcaccagaggaagaggggcccagcagcacgccagcattcacccacctgtgggtatcagtcaggctcctggtggaagccagaggacatattcgaatgggtacttgaggaaaggggctgttcacagaagtgtggaccgagttaagggaaccaataagagatgaggaatgtcctggaccagcaagagtgggagctgttatctccctgggtctagagggacaggaaaggtgtccacagatcccaaagagagctgtggctgtagaggaggatcatcaggagctgcagccatcagtagaaagatgtggccactgccaaaccaacaaggaagaatctgagcgaataaccacctctcctctctctctctctcccacctcctatgacgtcctccactgtgtgaattccactagggccagacagtgaggcaccctggtgatgcagtccaagagggagtgggcagagaggagccagtgggtatggaggggaaacagagaaacagagaattccagctcactctgcgggatttctgggtctgatagaaacatggcattattattattattattattattattattattattattattattattttgagatggagttttgctcttgttacccaggctgaagtgcagtagcatgatctcggctcactgcaacttctgcctcccgcgttcaagagatcctcctgcctcagcctcccgagtagctgggattaccggcacatgccaccatgccttgctaatttttgtatttttggtacagatgaggtttcaccatgttgaacaggctggtcttgaactcctgacctcaggtgatccacctgcctcggcctcccaaagggctgggattacaggcatgagccactgcccagcctgcagcagcttaattttacagtgtcccttttctccttctggaaactatatggggcaacaacaagactgaggaggaagaggaggaggaggaggaggaggaggaggaggaaaaagcccatcatcaatacacacatcaaactcaacttcagagaaattaggaagctgggaagccacgtaaacccaaaagcaggagacaccagcagaaccaacgcaggaagccagggaagtgcagaagaacagggcatggggggcaacccaggggggaatcttcactgttgccagcaacacacattcccagcaggagaggaccctcagagtgagaacgcagagctggagaaatgaagaaggagcaggtggtgcccggggaagtccaggggtgtgggatctgagagcacgccttcccaagagaggcgggaacacttgggaaggcagggctgagtccctggaggctgtatctgggaaaggaggctggcagtagaatcttcctgaagccgagtaggttctgagaggcagaggggcagtggtacagaggtgaggctgacgcttctgtgcaggaagggcaggctcctgaggaagggagccccgaatgctctccactagattcccagggagccccactccctccacagggacctcgcgctgacatctgggaaatgccattcatactggaacgtccgacacactgccatgaatgtgagggttttgtgactgatggggtaggtttctctcttccaacttaatagtataatgtccatttattcctcccccagcctccctgaacatgcacctcttagatagccacagtacggtgatcagaaccaggaaatccacattctcatatttaactatattaaaattatttcacaaaataaccaattttattaatttaattaaatacatttaactaatgtttaaatatatttaaataatttaactgatttaaaatgaacatattcgctaaacaaaagaccttattggagtttcaccactttttccactaatgtcctttttctgttcccaaattccacccaggatcacgctgcatttagttatttcttagtctctcgccgttttgtaggactgcaataacagttcctcaatctttccttatctttcataaccgtgacatcttgaaccagtactgatcagtatttatgaaatgttcctcgatttgggattgtctgatgtatttccatgattggactgaagttacgaacttttggcaattacagcacaaaaatgatgtggaatccttcccagtgcattccatcagagttatggcattgatagttcttcttactgatgatgttgaacttgttcatttggttcaggtttctgctgggtttctccattgtaaagatactatctttccccctcatagggggaaagatcttaggagaaatacttggagactatgaaaattttgtattttctcaaacgttaaaattttttttcaggccaggcgcagtggctcatgcctctaatcctagcactttgggatgccgatgtgggtggatcacctgaggtcaggagttcaaaaccagcttgatcaacatggagaaaccccatacctaccaaaaatacaaaattagccaggcatggtggtgcatgcctgtaatcccagctactcaggaggctgaggaaagagaattgcttgaacccgggaggagaggctgcagtgagctgagatcgtgccattgcactccagcctggataacaagagcaaaagtccatcacaaaaaaaaaaaaaaggccaggcgcaatggctcacacctgtaatcccagcactttgggaggccaaggtgggtggatcacctgaggtcaggagttggagaccagcctgaccaacatggagaaaccccatctctactaaaataaaatacaaaattaactgggcatggtggtgcatgcctgtaatcccagctactcaggaggctgaggcagtagaattgcttgaacacgggaggtggaggttgccgtgagccgagatcctgccattgcactccagcctggccaacaaaagcaaacctccatctcaaaaaaaaaaaacaacaacaaaacacctattttgacagccgggcatggtggctcacacctgtaatcccagaactttgggaggccaaggcaggcggatcacctgaagtcaggagttcaagaccagcctggcgaacatggtgaaaccccgtctctactaaacatacaaaaattagttgggcatggtggcatgtgcctgtaagttccagctacttgggaggctgaggcaggagaatcacttgaacccagaaggcagaggttgcagtgagccgagacggcgccattgcactccagcctgggcaatagagtgagggatctcaaaaaattataatgaaaaaataataattctattttgaattgtggtaaaatatacataaaatttactaccttaaccacttctaagtggcagttggaacaggggtcaaggagagcccttgggttgggtaatgtatattcacattgccatgcaaccaatctctggaactttttcatctgacaaaaccaaaactctatatccactaagcaacttcccattttctcccttccccatgtccctggcaacccccgttctaccttctgtttctattagtttgcttactcagtctggacgcttcacataagtgaaggaacaccgtatttgtctttttctaactggcttatttcacttagcgtaatgtcctcaatgttcatccatgttgtagcatgtgttagaatttccttcctttttaaggctgaagaacattttattgtatgtatataccacattttatcaattcatctgcctatggacaactaggctgcatccatcttttgacgagtgtgaataccactgctataaatatcagtgtacacatatttctatgagaccttgctttcaattattttggctatatacccagaagtgatattgccggatcatttggtaattctatttttaattttttgagaaactgcctgtcctgtgctgagcaggtctatataaacctacccgcaaaggccaaggaacctgagataccaaagaaagaggctgacaaatccagtttctcagaaagaaacatttaataggcgtttatgaacagaaggcaagtcagggatggcaccaagataagatggtggatccctgtgccatcacccccacccccccgacccagggcttctatagcataggggaagggtaatgcgggcttcagcagggatgtgtatggccagacacggtggctcacgcctgcaatcccagctctttgggaggccaaggtgggcggatcacctgaggtcaggagttccagaccagcctggccaacacggtaaaacctcgtctctactaaaaatacaaaaattagccaggcgtggtggcaggcgcctgtaatcccagttactcgggaagctgaggcaggagaatcgcttgagcccaggaggtgaagtttgcagtgagctgagattgtgccactgaagtccaacctgggagacagagtgagactcggtctcaaaaaataaaaaataaaaaataatttttttaaaaagataaaatagaaatcgtagatgaattgttggaactgggattaatcagaatatggcagattagcatccaagatggaattgctttattctcattcaaggtttccctcattcttcactctccccatgctggtcaccttgctgtttgttcctcaaacacatatgaaatgcgtttctgtcttggcagtcatcctgctacctgtaatgtcagcactgctttctgttgtcccttcagtcaggtcactgttcaaatagctctctagacaggctcttccttatcattctacttaaaatagcccccaatcactctgtgtccctttagcctgcttcctcttcctgctatttcatactacctgaaaaaatacttgaacttcctagaacataagctcataaaagcaagaactgtgctccacctctcctctcctctaccccagcactcagaagagaaacagagtcagcatccagtgagtgttcatgaatcaagtcactgcttggcagaattcagcactgggaccacagcctcgcctatcttcaactctttctccttctgcttttcctcctcccactctagtagccactcttctgggggcttgtcccttaaatgattagtccttactgacctattttctgtccactttatctgtttttgagagagggtctcactctgttgcccaggctggagtgcagtggcatgaatatgggtcactgcagcctccacctcctgggctcaagtgatcttcctgcctcagcctgccatgccatgtaactgaggccacaggcatgtgccaccatgtccagctaatttcttgatttttttttggtagaaatgggtctcactttattgcccagtctggtcttgaagtcctacactcgagcagtcctctcaacttggcctcccaaagtgctgggattacaggcatgagatactgcacctggtcttattttttcttttcttaagatacagggtctcaccatctggcccaggctgaactcaaactgctgagctcaagtaattcccccacctcagcctccgaagtagctaggactaaaggcatgaaaccaccatgcttggcttgtccaatttcattctacacactttcttggtatttaaacagctgctgttgctcttcattctgtagctctacatcagattcatgctctagtcctgtatatccaaatgatgactagaggctgccggctctgctctttcaaaggcacaatgagcgtagcccgtctacaaaactctcccttttccaatccagctttccctcctgcatcacctatctctctacatctggaaccatcggcagctgccttcataaggcacctcagtctggcattcggaaaaccaccctgtcttgccagagcctcttggtcttgggtagcaaaagctgtatgcaatctaaatcaagctttcaatcatgagaaatcacattccttcttttccctttgtaatatactcatgtgtttttttttttcctttctcaataagcaaattgtaccaccatcttattctgagatgctcctttttaaaagctgtagatcacattaatggaagtggttactgctgggaatattttccatgtgcaatgatctgtaaccctctttttcttttttttgagaccgagtcttgctctgttgcccaggccagagtgcagtggcacaatctctgctcactgcaagctttgcctcctgagttcatgccattatcctgcctcagcctcccaagtagctgggactacaggtgcccgccaccacgcccagctaatttttttttttgagatggagtctcgcttggtcgcccaggctggagtgcagtggtgcaatctcagctcattgcaagctccgcctcctgggttcacgccattctcctgcctcagcctcccgagtagctgggactacaggtgcccgccaccacacctggctaatttttttttttttttgtatttttagcagagatggggtttcaccatgttagccaggatggtcttgatctcctgacctcatgatccgcctgcctcggcctcccaaagtgctgggattacaggtgtgagccaccacgcctggccattcccagctaattttttgtattttttagtagagatggggtttcatgatgttagccaggatggtctcaatctcctgacctggtgatcagtccgcctaggcctcccaaagtgctaggattacaggtgtgagccactgcgcccagcctaactgtaaccctcttatctcaactagctgacattattacttcacatccagttcaatttataaattaagagaggtgccatgggcctggtacggtggctcacccccataatcccaacactttgggaggccgaggcaggtggatcacgaggtcaggagttcgagaccatcctggctaacatggtgaaaccacgtctctactaaaaatacaaaaaattagccaggtgtggtggcaggcacctgtagtcccagctacctgagaggctgaggcaggagaatggtgtgaatccaggaggcagagcttgcagtgagcagatatcatgccactgcactccagctggggcaacagagcaaaacatcgtccaaaaaaataaaaataaaaataaaaatgaaaaagaggtgccatgtgtacaaaaatcaatgcacatttatgaaattttttttcaaatatattttcacacattttatctaaatacataatacagaagcctgtgtgacttgggcaatgtggccaggagggcctgagactaacacatccaccttggcaaaaggacataaaatatgtcttatggtcagaaaaatcaacattttgtgtatttacttagtttacgaaaagtactgaaaatgctattactagctgaatttgtgatttccttttgaaattctgagttatccttatttttcccattttgtttttgcaccaaggagactgcagtcaaataaaacagatactacacgcactcgtcggggcagccgtactgcagaagcacgttgatgcactcctggctggaggcctgccgggcgtaggtcagcgctgtgttcccgtgggcatctcgggccatgacgtccaccccgtcaggagctgctccaggaccacattccccttgcggcaggccagatggagtgccgtgcagccgtctccctccccacaggtctcgttcacctcctcacgggagccatgtgccagcagcaggatggctgtctgcaggtcctcatcagtggtggcccgcagcagctgctggcccagggacagctcagtgcagggtagtggggccagaaagagcttctcctcatatttggaacggatccaccattccttctcttccctcgtggactttattgagggttttgtctgcccctggctgctcccttcccagatgctgttggctagctcattgccaatagatgacataaccttcctgagctcaactggccagtcatccagctccagagatcgcacacgggaaaggcgggtgccaaaactgcggtggatacctgagcattcaatacacatgaggactcccaagttcaaactggcccacttaggattctgggtctcacagtccacacagtgggcgttcccacgcatgttttggatcgactgcagggccatggcctcactctggctggtcagctgggacttgcttttactgctcttgcatgactgcaggctggccaggatctggctctggatggcttggacccaggcatcccgctcctcatacgtcgtggcttcaaagtgccacgtttggccagtggcagacacaatcataaagttgttggtgcttttcttctttaggtgtttctttttattggcatgaggagaggggggcgggttgagcttggggctggtggtgctggagataccggggctgaagcatatggagtcacccagcccggtgtccatgtccttggataggccattgcttttagagctggagatgggtgcacaggctgatgtggctagggatggccactttcctgggactttgatggtagatgtccgaaggtcaatctcttttttatgaatattcttcatataatcacctaagcttgaataataggtgagcacgccattggaacacagggtgacgtatttctttttccatgtcttcagccattttccacttcgctttaagagcatgccctgtttaatggggatggctctgccgctcccgatggtgtcagcatgattctccggggctttcctctctttgtctgggtcactccctttctcagatgtaaacaggttggaccagcgcatggacagcttgcaaacgggggtgggtgtgttggcagtgggaggaacactgaactgagggtcctcctggctggtgctgggagtcggtggaatggaggaggaatagttatttaaactcccacctccatttcttttcttcataatgtgcacggtggaaacctgtgtggaacaggaggaggaatggcttcaaaaattgggtagtggcttgcaggatcctatagacagctcacaattaccttttaaaaagatacattttctgggccaggcatggtggctcacacctgtaatcacagcactttgggaggccaaggtgggtggatcacgaggtcaggagttcaagaccatcctggccaacatggtgaaaccctgtctttacaaaaaaaaaaaaaagaaaaaaaaattagctgggcatggtggcacatgcctgtaattccagttactcgggaggctgaggcaggagaattgcttgaacagggacctgggaggcagagcctgcagtgagccaagatcgcgcgattgcactccagcctgggctacagaaagagagtccatcaaaaaaaaaaaaaaaaaaaaaaaaaaaaagatacattttctgttgtttggatagtatatttactcacactagctcactaactaaacagagctgcagatcagttcttactccagcacattctttttacaacacttaagatgactaaatgcaacatgaaatggggaagatttaaaaaaagatggctttgacttcagcatgaaacagatacaagtgtacgatgaaaatacaacctcaataaaagtgccacttaccgcaaatgagtgtaactgttcatcaggtatgctcaaagatctatctgcatctctataaaataagaaagtgcattacttcaaaaactgttaatatcttagtataatatttgttgagtaaaatacttcctcctgtgtgctttggtgtttactttaccaaagcagtttttacaaattcttctcctggatcctgacttgcagagggtttcctgacttcttctttctcagcacatcatggtctgtaccgtgaagccttttatatgataaccagtcagaaatgcccatgagtattgactctccctaacaggccatggcaataaaccaaacatattttcactcttctaaccacacattgaaacacaagaatgttctacaaagcagtagtagtaaactttaataaatgtaaatgtgattcagatttcctagcttcctttctctttagttctctgtagtatactctcatgatgtttttatgtattttctgttgtctgaatgacaaactcatctacctttttaagaggccagtctttgaggaactttaaactttgtaaaactaatgcattgtgcctgtgtataaaccagtggttctccaaatgtgctctgtggacctctcgggatcccgaagaccccttccagaaggcctaagaggtcataactgttctttttttttttttttttttttttttttgagaccaagttttactcttgttgcccaggctggagtgcaatggtgcgatctcggctcatggcaaccttcgcctcccaggttcaagtgattctcctaccccagcctcccaagtagcagggattacaggcacctgccaccactcctggctaagttttgtatttttagtagagatgtggtttcaccatgttggccaggctggtcttgaactcctaacctcaggcgatccacttgcctcggcctcccaaagtgctgggattacaggcctgagccactgtgcctggccaacactgttctgaatcatactaattaaacctgagaaagctgatgaaaaattttaaaaatttgtgaaagtaatacaaagtcattgcctgctttttcgttgacacttgccatgattgtataaaagcaaaagtaggtacaatggctggtttctcagcataaatcaaggcagtggtaccaattacattagtagtcattctattcttcactgtcccctacaggtaaaaaacatagcctgaatttcttaagaacgtctttgatgaagcaataaaaattaatgttgttaaatcttgacatgtctctaatattctgaataagtggaaagttaatgagaagtgctttttttttgtttttaaagaatccgtgatttaactgtgaactgaaaaatcacttttttcacagaacatcatttttatttaaaagtacaactgggccagcgcagtggctcacgcctgtaaaatcccagcactttgagaggccaaagcaggcagatggcctgagctccttcaggagttcgggaccagcctaggcaacataacgaaaccgtgtctctatcaaacatataagaaaattagcctggcgtggtgccacacatctgtggtcccagctacacaggagcctgaggtgagaggattgcttgagctgagatcatgccaatgcactccagccaagtgacagagtgaaactcggtctaaaaaaccagttcaactatcattctcaaaaataaatgaagtgagaggttgtcacttcaagggaaatacgtatttgttcccaatgataaaatttaagctttcctgtggactttgaaaaacttgttccttctactgtaggcttggcagcttttcaatacttaaaggcctgttaaagtaagattggtggttaaactaaaagtgatttttgacacaataaaacataaaccaatatattccaagtaactaatgcatgatattataaatgcaagtatggagcaaaagatccatttactgtgcaagaaagatcaatgagtactgatggaataaatttattaatatgtaaaatgccaccgtaactaatttaagaaaccaccacttgtgaagttttgatttagtgttttaacaaatacccacaactgtctgaaaactttaaaaatacaccttctaccaactacatatttgcatgaggttaggtcatcttattgcttctttttctctttttttgagacagagtctctctctgtcacccaggctggggtgcaatggcaagatctcggctcactgcaacctccacctcccaggctcaagtgattctcctgcctcagcctcccaagtaactgggactacaggcatgcaccaccacgcccagccattttttgtactttcagtagaggcgggttttaccatgttggtcgggctggtctcaaactcctgacctcaagtgatccacccaccttggcctcccaaaatgctgggattacaggtgtgaaccactgcgccccaccagcttattgctttttttgtttgtttgtttagacagagtcttgctctgtcacccaggctgcagtgcaatggcacgatctcagctctctgcaacctccgcctcccaagttcaagcggttctcctgcctcagcctccagaatacgtgggactacaggtgcgtgccaccatgcccagctaagtttttgtatttttagtagagacggggtttcgccgtgttagccaggatggtctcgatctcctgaccttgtgatccgcccgcctcagcctcccaaagtgctgggattacaggcgtgagccactgtgcccagcctcatattgcttctttgaagcaaattgcaaagaaagctctagagaatccatttgtctcctattaagctcaacatgagagactttaaataatataaacaaatgacacactttttactcaactttttgttgtagaaaagttttttttcaatgaaaaacttctgttaacaatactgttctcaaggaatattttctgtttttataaactgggtcatgggttactactgacatctagttggtagaggccatgaatactgctaaactctctgcaatgcacaagacagtcctcacaacaaagcattatctagcccataatatcaacagtggtaaggctgtgaaatctaaactaaaaatagattttgaaaaaatttcaattgtataattctaccacactaaatatcaatataatcaatataaacatatactctttgagattctcaatcatttaagaattatgagagtcttaaggaacaaagaaaatacaaataatttgcttcgatattttagtaggcacaatacagcttatgatgtctagagctgtgacctaacactgagcttgatatcttgcaaagtaattagctagaataacaagacaggtttctaaaaagctcacctttgtgtgatatgatgaggtatctccaaggtcacactgtggaaggaaaacaaattcataacaatagatgttatcatttgttaggcctgcagacattttttaaaaggggggcagaggaaactctcctagcggccctgaaattcaaatcttctagttcagaacagtaccataagggcactttgttttcatttctttgttttttacaaaaatatgagaaccaaaatgcaaggaaatatgccgttagaagacgcgtttctgttggtgattacaatatataaataataacagatttcccttttatatgcttttctaccgatgaaacctttcgtcccatgcgatttattttatgtatttatttattttttgacccagagtctgtctctcttgctcagactggactgcagtggtgccatcttgactcctcacaacctccaccacccaggttcaagcgattctcacgcctcagcctcccaagaagctgggactacaagtttgcgccactatgcccagataattttttttttgggggggtggtgggtggagtttcgctcttgttgcccaggctggagtgcaatggtgtgatctcggctcaccacaacctctgcctcccgggttcaagagattctcctgcctcagcctcccaagtggctgggattacaggcatgtaccaccacacccagctaattttgtagagtgaggctcaaaacaactgagggaaggtaaatctcaattctactaataggtctacacaatattagcactttttaaaaagcctgtaacattagcatgtgagatggatatgtctatagtgcttcaagtagttttcatctctgaaataattttaaaatcacagaatttaaagttacatgctggaaaggaccaatgaccttatgtgacatttaattcaacacttgttttacagatcagggaaacaaaccttaaaactgacttgcccaaggtcccaccaaataggagcagtttctcgtcctaaactcaaattaagcagtggctctcaaactttgctgcacattaaaatcgcctgagaagctttaatatctgcctcatcttccacatgagacattttaatttaattagtattgggtatggctttgggcatcaaggttcttggtaaacgtttcccaggtgatttcaatcagcagcaaagtttggaatgattgagctggggtgaaaatcagaatcttctgggatgcttttcttcacagaaagatgcctcacatccatcccgattttcctaaaaggcttctcagtgcctagagatagagggaaagtggagatgggaagatacatgtatttgcagacttgcattttgaaaaaaaccttgcataagtgatctcagcgagttccacctatcccactgacaacagtgcactactgattcatgataaaacatttttcaatatatcttcttgaagccaatttgccctattaatttgttcaataactttatttcaccaatagtgaatacaccaaatgattatttctcaaacttgctggtggcaaattaaaacttactatactctcaaaagtagacttctaaaaagtagaataatgaggaaaaaagcacaaaattagtttcagcaaaattaatcttcaaagctgcttttgaattatatgctaacttatcaaaatctttggaactcagaagaagccagggactctagtcaaagtaatttttgtgtatgtgtgctcaaagatttaagagacttggctgactacagacatttagtgattactcaataggtcccaaagctcaggacttgagacagagtttgagttcagtttttgtttgaaacacaatttcctctcaactattgttaaaagggagggaggaaagtgacattattatgagtgtaaacttgccacttttaattgaagtaaaagttattgacaattgaattagctaaaaaggctagtgcatttgaaacaaaattgtttataagctagttatgtttacagaatgaaaagttaaattaaagataaagacattaatattctaaattagcactttccaaactgtgttctaaaaatcaagactaataacccaaggagatgagaataatgtacactggacggcccctgtggagctggtggtggtgttggttgttgttccttttaaaataaacttcatctcagggtgctctcaaagcgcatctttgtggcccacgaggtgctcatgcacaatgggagaaattcaaatgcagatacactgtggtgccagaagaagaaaagctgttccttcttccaaggataatgtccaaagtagtgcacactgatttgggcctatgatgcattgaaaaactaagtttccacaaaaaacattcaataaagggaacctatccttctcactgtgttcaacattgtctaaaggcataaagacatcaaaaagacacactgtttctgggtttgcttctttgctaactgatttttccttccaccacgacgtctaagattaaaagagaaactgatacttaatattcagaatctgaatatcaatatatggttgactccaatttcttaagctgattgctgaagaggacaaccaaatggctgaaataatttccgaataaaggaatctgtccctcggcagcatagttgtactcacgatattattgtcattgtaagataatgctggatggctgtgctgtcatcaaggaatattgtcgaacacgagctgtattgttgactgaaacgctcagtagatacctgaaggggaagggaagtgtaagtcaaacttatcaaagtgtatttttttctcagttaaaatgtcaaatgacaaagcactaagatatgtcttacactccatgaactgcctgagtgtggtatcatgtgcaatctatagaaaacccattggaggctctcaacttccagagatgatgtttaagatatgggttataaaatgctgcccttaatatggtacctgtcatcaaacctaacaaggattttatgaattaccgttaaaaataatgggaaaagtcggcttcgccgggcgcggtggctcacacctgtaatcctagcactttgggaggtggaggcgggcagatcacgaggtcaagagatcgagaccatcctggctaacatggtgaaaccccgtctctactaaaaatacaaaaaattagccgggcgtggtagcaggcccctgtagtcccagctactcgagaggctgaaacaggagaatggggcgaacccaggaggcagagcttgcagtgagccgagttcgcgccactgcactccaggccgggagacaaagtgagactccgtctcaaaaaaaaaaaaaaaaaaagaaagaaaagtttaaaatgagatttcatatttttttctacagcaataaaaagcagccaagaatttctattaattaattaattaattaatttatttatttatttatttatttttgagacggagtctcgctctgtagcccaggctggagtgcagtggcgcgatctcggctcactgcaagctccgcctcccgggttcacgccattctcctgactcagcctcctgagtagctgggactacaggcgcccgccaccatgcccggctaactttttgtatttttagtagagacggggtttcaccgtgttagccaggatggtctcgatctcctcacctcgtgatctgcctgcctcagcctcccaaagtactgggattacaggcgtgagccacggcgcccagtccttctattatttatttactacgataaaatgtagtgtattaaataatcctgctacaagagcactttattgcagtgaatacaagactaatgcatttactaaattactaatcctaaacgtattatttcaggtgatattgttacaaaagaagtgtttcagattcaggggctctgtgtgccagggctgctaggccaccaacaagtgaggaagccataggtttctctagtcctattttcttatgtggaggataaaaagagtatcacttaaatattctctcacaccctaaaaacaaatgacaacttaaaaaatctaactttcacttcatgtttaaataagactgccaagacatgactcaaatgagactcttggagaatactttgcattcacttcaaaacttgatcaattgcattctataaatcatctgacctgcacctagccattttcctgctctacccctgctctctgcctagaatactgcttttctctttccttgcttcagcaagctcgactccatctaccctcttggatctctttgtcggcagccacaccaaaaaatgtatttttatacactaattagttgaattcaccactgcttacaagatgctaattcctgcagagtattcccctcatgagaaagtatgcctctccataagagtaagggagggcccttactcttcctacctccagctgctgagcatagaattttgagtaaatccaaaacttcgacaagtgtttgacaattcagtcatcatttggaaggtaagtcttactacatttaattacagcaaaaacactactaacagtttactctttataggtattatttaaggtagtcacaaaatagaaacaaataatctaacgtcagtcagcataaatgagagtatgaaattttacaatatttaacaagaaatggaaggggttacttagtagttttaaggtttaatgacaaaaactagaaaataatcgtacctagtaatttagtaagtcaaaaccaaagccttaccatcaaaggtgcagtacccattggatgcggatgcccacgcactgacttctgctgtacctgctgcctctcattttaacccattaaaaatactaaagttgttttccttgtagacatctttcacctccttggttaggtctattccgaagtactttattttattttagtttatttttgcagctatcagaaaaggggttgagttcttggtttgattctaagcttggtcgcttctggggtataacagagctactgatttgtgtacattaattttgtctcctgaaactttgctgaattcatttatcggttctaggagctttttggaggagtctttagggtttcctaggtatatgatcatatcatcatcaaacagcaacagtttgacttcctctttactgatctgcatgccttttattgttttctcttgtgtgattgctctggctaggccttccagtagtatgttgaatacaagtggtgagagtgggcatccttgtcttgttccagttctcggggggaatgctttcaacttttccccctttcagtattatgttgttgtgggtttgtcatagatggcttttattacattgagctatgacccttgtatgctgattttgctgagggttttaatcataaaaggatgctgcattttgtcaaatgctttttctgcatctgttaagatgatcatgtgattttttgtttttaattctgtttatgtggtgtatcacatttattgacttgtgtatgttaatccatccccgcatccctggtatgaaacccatttgatcatggtggattatcttttttttattttttgagatggagtcttgctctgttgcccaggctggagtatgcaatgcggtgatcttggctcactgcaacctctgcctccgaggttcaagcgattctcctgcctcagccacccgagtagatgggataacaggtgagcgccaccacgcccggctaacttttgtatttttagtagagatggggtttcaccatgttggccaggctggtctcgaactcctgacctcatgatccgtccgcctcagcctcccaaagtgctgggattacaggtgtgagccaccgtgcctggcccgattatctttttgatatgccgttgggaactacaaaacattgctgaatgaagtcatggacacagacaaatggaaagacacccatgctcatgaatgggtagaatgaatattgtgaaaatgaccatactgccaaaagcaatctacaaattcaatgcaactcccatcaaaataccaccatccttcttcacagaactagaaaaaacagtcttgaaatttatatggaccaaacaagaaccggcacagccaaaacaaaactaagcaaaaacaacaaatctggaggcatgacattacctgatttcaaactatactataaggccatagtcgccaaaatagcacggtactgatataaaaataggcacatacaccaatggaatagaatagagaacccagaaataaactcaaatacctatagccaactgattttcaacaaagccacctaaaacataaagtgaagaaagtaaaccctattcaacaaatggtgctgggataattggcaagccacatgcgggagaatgaaactggatcctcaactctcaccttacacaaaaatcaactcaagatggatcaaggacataaatctatgacctgaaaccataaaagttctagaagataacattggaaaaacccgtctagacactggcttgggcaaagacttcatgaccaagaacacaaaagcaaatgcaacagaaacaaataggtgagacttaactaaagagcttctgcacaggaaaaggaacaatcaacagagtatacagacaaccacagagtgggaggaaatcttcgcagtctatacatctgacaaagggctattatccagaatctatgaggaactcaaacaaattacaattacaaaaatatggaaccagcccaaatgcccatcagtcaatgagcggataaagaaactgtgatatacatacatattatatatatatatatgaggaataccacctcagccataataaggaataaattcatggcattcccagcaacctggatggaagtaagactattattctaagtgaaataactcagcatggaaaaccaaatatcatgttctctttcctacgtgggagctaagctatgaggatgcaaagccataagaatgatacaatggactttggggacttgggggaaaggctgggaggagggtgagggataaaagactacaaattgggttcagcggatactgctcaggtgatgggtgcacctaaatctcacaaatcatcactaaagaacttagtcatgtcaccaaatgccacctgttcccccagaaacctatggaaataataaataaataaataaagtacagcatttttctcagcaaacataaaataaaacaaagactaaagttcatatttttcactctccttttgggcaggacaaattttagataggtttttaaagaattagtaacttttttcctttttccgagacagggtctccctttgttgcccaggctggagtgcagtggtgcaattatagttaactgcagcctcaaactcctgagctcaggtgatcctctgcctcagcctcctgagtaggtaatatgaaaggcgcatgccacgaggcctggctaatttgttatttaacctttttgtagacatgaggtcttgctatgttgaccaggctaaaaatgaacaaatcttaattaacttaaatatttctaacaccttgggcattcaggaaaacagctccatttatgttgtgaagtaatgggaagcatatggcagtggataaactttgaatgaaaatattaaacaaggccttaggagaaaagtgtaatatgcttattatagatacattaatttaaaaaattctctggcttaatatcattatactcaaattagactttgatttaaacataggtcctaaatttggattaaatataatagattgaccacaaatttatttcgtctccctctggaagcctcattagtcataaaataaaggttacacccatgaccagcacagaaggttgacagagataatttttagtaaatgctgagacataaaaagtagacaaaggagtggtaaataacacagaaacacaactttgctgactacagaaagtgactggaacagaagcgagccagtttgtcttgcagaactaaaggcaggttgtgaacttacaggcaaatggcactttggaaagtagggtaaaatgtaaaaaaaaaaagccagcaaggtcagttgcaaatctctaactagagcccaaagtctacctgtccttccatctgacaagaaacttagatgtgtgttctctggatatatcaaacctgagaatttctggctcagagatactatggcttaaacctgagatataaagaaaactgtacaccaaaaatggaactccaactttctttgctaactctgcttttcctttccaggcctgcttttactttccaggcagaaaattgggagatccttctcagaagaaactgaaatgtcttcagtaaagatccccagataatacactgaggtctcccaaatgaaaagctagtcaggcttctaaggcctcacactgagtgctatcagttaacagaaatcctgcttccaaataaagcaggccagggaccaccacacattggagggaagcctccaagaaaagagatcaaaacaatagaaaaaaggaattgataggaccagtcaaaatcaggagcaaaactttaaaaaaaaaatcttaaaacactctcaaaaaatataaaattcaatagaaatagtagaggataaagtcacagaatatcccagaactagaataaaaagacaaactgaaaaaaatagaaggggaaaaattaaaaatcaatgcaggtgtactggtctaagcagcctagcatctgaagaacaagactatcagtaaaaaagtaacagagaaaataaaaaaaaaattctcaagaagagatagtctgcaggtttagtagcctcaataaaatgaaaagatccccaacaagctgttataaaatttcagaaccttagagagagagattctaaaaagcttccgcagataactaaaacctggttgtaaataacatatcacacactggcaatagattcaagaacaacactgtaataagagcacaactgcaaaatgtcttcagaaccatacaatttagattcaacctagaggtgtactctctatcaaagaggagggattttaacatctccacccaggaaaatgtgttcaagtacaactagagacgataacaggacagaaggaaacacagaatctaggactcaggagatcccacacaagacagcagttacgtgagatcccaaaagactttaaggagttagcccagaaaagcagacattgagcatatctagggaaacccacgctatattgaactaggatgacaaaaggccaaagaaagttgccccccacacacacataaaaaggaacagatgtgtttttgcagatggaaaatatctttgaaaggcatgtgataaatgctacaatacttgggggaaaaacagctattagaaaataggcaaatgaatatagtcagaaaattagcttcatgctaaaaaataatggatgtgaaagcaaacagagcacccagaggctacttaatgatatttggatagataaactaacataggctaggaaaaaagaagatccaggagaattgcagaagtgctcagatttcagaactgtttcagagacaggatgaaggacatggaatgcagaggcacagtgaaaacaccatatgacttagcagtgaataatatttgcagagtcataatcatgtaaatattactgatttaattaaaaagtgtgctacaattggaagaaacacagggagaaacataagatcatggtgtagcgaggaagatacgcttttacccgctgtgatagaaagtcaatagacagtgctggcaattaacttaactattctatttttgttctttcattaaaaataagattaaatatttaaggcacttttttttttttttttttttttgagacagagtttcgctctgtcgcccaggctggagtgcaatggcacgatcttggctcactgcaacctccgcctcctgggttcaagtgattcttctgcctcagcctcctgactagctgagattacaggcatgcaccagcacgcccggctacttttgtatttttagtagatacagaatttcaccatgttggtcagggttgtctcaaactcctgacctcagatgatcagcctgccttggcctcctaaagtgctgtgattacagacgttagccaccatgcccagccttaaggcagatcttttgaaccagactattgaaatttaacttaaatgtcagaaatctttaaaaggtggacacgctaagctaaacacttttctggataaatttaatactcaggaaaatagaagagatttagaaaatccacaaaaagaggtccatgctaccaccaccaggtccacattgtaatttaaagaaatcaagagagacatccttttatgtcaaactatcaatttcttaactatttgagtgtttacttacatggtttgtacagttgcttcttcttatttctacaactaagaataaaaaaaaaaaaaactggtcacttctgatacaaataccataaaataaaagtagttgttaacatcttactgattactcctatgtaaaatgagacaaaattccatttaaaaaaataattttcaataatttataatttaaattatctggcatgattaatttcataagtcaaatctaaaaacttagtttttcatttagtttactttttgtttctattacatacaaatgaaagaatcctcatgtacaaaagaaaagggtaaaaaaattaggccagatgaaaaatttagctaataaaaagtttaactgttgcatatatgagccatgatccattagtattctctcattctgcatttacacatagcttactttaattatcagactctaagagctaacagctctaagaactacgtcctgaccagacacctatctctagatgcaacagaatccctgtaagcatcttgaaccacacttagtggttatctactaatatgtcactaaaaacaaatcaaaattaaaaaacggtctttacacaactggaaagtaacgtatcttaatttttttttttttgagatggagtctcactctgtcacctaggctcgagtgcagtggtgggatctcagctcactgcaacctctacctcccaggttcaaccaattcttcagccttagcctcctgactagctgggactacaggcacgtgccaccatgcctagctaatttttttttgtatttttagtagagacagagttacactgtgttagccaggatggtcttgatctcctaacctcgtgatccacccacctcagcctcccaaagagctgggattacaggtgtaagccacagagcctggcctaaattttgatgttaaaatgagtatacaaacctaattggacatggtgtctgaagctcaaaaaatcattttttttcctctaaaaagaggccagaataataaaagccccaagagggacttgggccatgctttgtttcctacactgcctctgcctttgatgctggaagggccttgtaggcaaaagttcctaccaccgaagagtgagggacatggaatagcttttcttttactgcttccatgctctctaggtgtgagaagcccatggctctggaaggaactgggaaatacaattctgatatgttttggatatgttgcccctccaagtctcatgttaacatgtgacccttaatgttggagacagggcctagtgggaggcatttgggtaatggcagtggattccttatgaatggcttggtcccatccccatggtaataagcaaattctcattatggtaatttaaaaggctgtggtactggccaggtgcggtggctgaagcctgtaatcccagcactttgggaggctgaagcgggtagatcacttgaggtcaggagtttcagaccagcctggctaacatggtgaaaccctgtctctaccaaaaatacagaaattagccaggtgttatggtgcccacctatagtcccaactactcgggaggctgaggcaggagaattgcttgaacctgggagatggaggttgtagtgagccaagattgtgccattgcactccagtctgggcaacagagtgagactccatttcaaaaaaaaaaaaaaaaaagagtgtggtaccttcccccttcccctctctctttcaccgtgtggaaccacctgcttcccctttgccttttatcatgattgtaagtttgctgaggccctcaccagaagcagatgttaaagccatgtttgtacagcctgaaaatctttgagccaattaaacctcttttttgttataaattacccagccttaggtatctctttatagtaatgtaaaaaatgaagacaaattctaaccagaaataactgactcaagatgggcaaagtctactcaaactataaaaacaaaggttacaaactcccgtgttttactgtgctgcattacttcgcacactattatagaaccctcacttgtattcttgctgtttaagtcaactggaaaacttggctgtgtatggcttgttggcaaataaatgaggatttaacataacattagggaaataagcaggagtagggcatgtttaaatttacatgacatcaaatgaaaaagttaataacctaaaacttttgagtagcatgaacttggatgtggtaaatgaatgtggtcagaggactgtgtaagaggaggcccaaatcacagattcaatccctgatgataaacaactatgttttttaatttgtttaaatgaaaaccaagctgaagcctaagttctatcattcatctttaaagtgtactttttggagcaagggaaaagggattataaataaagataaatccattaattataaataaagataaatccaagaattataaagagaaatccatgactcctccaacacatgacaaattaattgtgttgataaaaagatggcaaaatgtataaacaaaaaggttacacgttttcactaacatcataacaactaaaggaaagtatatcacatattaaaataagacaagtgaacatgtgaaaaggtgaaaaatttaaaccaatatgagtttttctaaatactttctataacctgatcaaacaagagcttttattctttctcttggcggaaaaaacaatgttgtctcaccatctgtttgagagttcctctggaatattgtgcttgcctctggattggcagaagagttaaactccaaagctatatgcatagaggaagaaaagaaaaagagatgcaatcattgataaaaatttatcaactcgtttattcggctgctgcatttaggctatttcactatctctactttgattcttatccattgaaatgaatgtatagacataagatagagccaggcaagatggcacatgcttgtagtcccagctactcaggaggctgagatgggaaaatcacttgaacccaggtcaggaagttgaggccagcatgagtaacacaatgacaccctcctttatttaaaaaaaaaaaaaaaaaaaaaaagaagaagaggtaaattttggctttgagttgtgtaaaatcaactttgcataaaataaatcaagatggcagtaagttttaaaagacagtctattttataggcaaaatataagatgtattctagagtttttaaaatttttaaaaagtaaattcatcatatctgtcacttccatttcattctgaggacacagaaccttagttctcttgagtagctgtcttccatagtcatgtgatatctctaagttttcatttcttcattagcaatacatagggagaacatacacaggccttatttgtattggaaagggccaagtgagacatacataaactgtgttgtaatcctaaagaatgacaataaagagccatttttgggctctcatccaacactacccatctactaactggtgtgtaacatccatcaggctttccaaacatcaccaagcagagtataagtttatacaagtacttacatgctttgtgtataaaggtacaatcaattaattcacacaatgcatttgtttattctaaagcaatccttaaatatcttgaaatgtgaagatagtacttccaagttacaaagtcacactcataatgagtcttaattatcctacctctttaaaaattaagagcccaaccaaagtttaaatagaagagctataagacatttcctctagagtaatgaaatctctggcatttaaatgaaaccaataagccaactggatttaatatgtttatgatgcaatgttttctattttgaaaatttcagtttttattcaagaaccatattattacccagaattacttttacttagattcatctctttgcaaaattttagaggcaaaccaactaattgttttctgttttctaccggctcccatcccctgcctctgccaacagtgtagagactaaaaaactccaactctttccttttttttttgtgagacggagtctcgctctgtcacccagcctggagtgcattggcgtgatctctgctcactgcaacctccacctcccaggtccaagcaattctcccgcctcagccttgtgagtagctggaactacagtcatgcgccactacgcccagctaatttttgtattttcttttttagtagagacagcgtttcaccatgttggccaggctggtctcgaactcctgacctcaggtgatccgcctgccacagcctcccaaagtgctgggattacaggcgtgagccaccaagcccagccaaaactgtaactttcttatctttgaacaagatgctattgtcaggaggggaagggacaaagggggagccacggcaacaaacactcttacagggaagtctgacattttaacctgcaatctttatattacacattaaaagtctacgttgacgtttcatgtcttttgaaagttttgaccgtgaaccaatccccacctctcttttagaacaaggaggtaaataaagtctgttaagtcaccagaataaatctggagacacattttctgttaaagtaagaattttaaagtaatcagagcctcataggtaaactcctttgagaaaccccaaacacacacacacaaccatttttctgcagccccggctgtgacattttatacctttcacaattattttaagcactctccttttttctttttccttctgtgttcaaattacagttagaagaaactaagcagcttctatcaaggtgacttaaagcagcccattaagaataccatatagcctctcccgtggcaacctccattctgattttaaataagaaatccccaaatatttgaataggaactgtcctgagatttggctactttaacaaaggaaacaattaggcacttacctggttccttcacttaggtaccatctggataggttcaaagaaaaattaagatgggtactgaaaagttgggatatttgagtttttattgagaaaaggaagagaatagctcaaagaagcctaaacaaagtcccacaggataataaacagagctacagacactgttgtctcaccatctgtttgagagttcctctggaatattgtgcttgcctctggattggcagaaaggttaaactccaaagctatatgtatagagggagaaaagaaaaaggacgtaatcatttataaaaatttatcaactcatttattcaactgctgcttattcgacaagagccataaataaatggtcccatgccagcctgggagaatgagatgagagagcaagaactgggcgattgggaggggaggtgaaaagaaactgactggactcggtggggaaagactaaggggtgggaattcaaggcagagccagcttttgttcctggccagcccccgggaaagctggctacaagcagaaaggagctcgaagtgtgggatgcctcaaagggaaccttggggacagcagcagccagaggcaaaccgagggtagatggcacctatcacctccttaccttcaggcatctcccggtcacgaacctggtgcatgtggaggtcctcaccaacttcaacagtcacctcagcaggctgtacagcagcagccatgggcgctcctgccatcctgtcctcagctcctgcctcatagatctcagattcagagggacacaccgacccctgctgctggtcaaactcgaggctgacgctagggtgcacacgacaggtcagtatgttccccatggggcgcctctactgtctgccaccacctgtgcctctgctcacagctttggccacgcactcccgctgtcctaggccgaggctatgctgcacttgcagagatggtcttcccgctcctcgcctgcccacctcacagtgcggccccgggcaccagccctggccccggccccggccccggccccggctagggctgcgggccaaggcccgcaccctgctgcctcccctgagttgacttgtctgggagggtgaagaccagccggcttatttaataggttgtgaacccaacaagcgctgagagacacaacaactgcctgaagagagaacagacggagctcctcctccttctgtagtcacctacagactgaagcccactggccccaggtgggagcccaggcatgtggcacacaatgccccaccccacacttcacaatgccctccccgacacctcacagtgccccaccctgcctgccacccctccccaacagctcagaatgcccctgccttggctgccccaccctgtggcttatgatgctgctgctctcctggcccctcgtgcagtgccaatgggactaaggttttcattcatcaccagcttcctgagattttagtcctaagaaaagcacagggtagttcattcctcgaagccagcttcctctacgagttctacacaaagcctcagtagagtgggtcccattagcaaccaagttgaacaacttttatttgctgtctgaatatagatacacctgaattgttgactgcttttgtaactaaacactcctctcctgtcttccaacgagtggtcatttttgtccgcaacttgatcacagcaatccctggggccctagctctactctcaataaagagttatggctgtgtgttttgaatgacaccttaggacccatcctgcctccacctccttctccataaaatagaaacctaacttgtccctccaagctctgaaatgctgaaacttaccaactcccttttctccccgctatttcttccttccatggcagggactttcagattttctttcttttactaacaaggcactaaacatgattttctcatacaaaatcgagagccataaagtggcttaccacagtcctatttcaataaagatgaatactcgacatctggcaagtagtgtgtgcctgacagtgtccccactgtgctatgctcatttaaccctcagaaacaatctcatgttacagattttacagaagttgttgggacagagaaggtaagtaaacccccccaaggtcacatgactgctaagggtggggccatagtttgatcccaggtagtctgaattccccaattgcttaagcatgattatcagaaagtatagcagtctgttttcacactgatataaagaaacacctgaggttgggtaatttttaaaggaaagaggcttaattgactcagtttcacatggctggggaggcctcaggaaacttacaatcatggcagagggggaagtccttcaggaaacttacaatcatggcagaagggcaggtccgacttacatggtggccgcacagagagtgggaacatgtgaaggagcaactgtcaaacatgtataaaaccatcagatctcagctgggcacggtggctcacacttgtaaccctagtactttgggaggccaaggcaggtggatcaactgaggtcaggagtttgagaccagcctagctaatgtagtgaaatcctgtctctactaaaaatacaaaaattagctgggtgtggttgtgcatgcctgtaatcccagctactcaggaggctgaggcaggagaatcactggaactcaagaggcagagactgcagtgagccaagatcgtgccatggcactcctgcctggacaacagagcaggactccatcccaagaaacaaaacaaaacaaaaccctataagatctcatgaggacttactgaatatcacaagaacagcatgaggataactgcccctgtgatccaatcacctccccctaggcccctccctcgacacatcgggattatggggattataattcatgatgatatttgggtggggacatggcaaaaccatatcagaaagtaaaggtagaagtcaagcttggatgggaaatgacattgtagattattattattattattattttgagacgaagttttgctcttgttgcccagtgaaattgtttctctaatttcattttcagattgtgtcttgtagatgtatagaaatacaattgataaatgattctggctattaaccttttatgcttcaaccttgctgaacactatttttttttttttttttttgagacggagtttcgttcttgttgcccaggctggactgcaatggcgtgatcttggctcactgcaacctccgcctcccgggctcaagcgattctcctgcctcagcctcccgagtagctgggattgcaggcatgcgtcaccatgcccagctaattttgtatttttagtagagacggggtttctccatgttgatcaggcccacctcagcctcccaaagtgctaggactacaggaatgagccatcgtgcccagccagattcgtatatttttaaaagaattttttttactttttattttttttttttttgagacagagtctcactctgttgcccaggtagtggcacaatcattgctcactgcaacctccacctcctgggtccaagtgattctcattcaagtgcctaagcctcccaagtagctgggattacaggatcccgcccccatgctcagctaatgtttgtatttttagtagagatggggtttcaccatgttgctcaggttgatctcgaactcctgacctcaggtgatccacctgccttggcctcccaaagtgctgggattgcaggcgtgagccaccactcccaaacagaacaacatttttttgatgtggattttaaaatgcctccccttctttcaacattaagtcccttctacatgccaggcactgtatgtgtgaaatagtcccaactctcaatgagtttaggcagatacacaaacaaaggcttaaggaggtcagttttctgagaccatactgctggacagtatatgaacctgggatacaaacccacctctatttgacctcaaatttgatgctggggtggttttaattttattctgggaatttcagtcattcaaccataaaaaggtgaaaagtctctgtcagatgtgcgtgtagtggtctgtataataaagactgaaggaagcaaccaaaccaattaagagactttctctaaaggcagagtaatgctaagggcagtggcagtgacaaaagtggaggaaaaagtctgtgatcatttgggagacagaataggaagtgcttggtcatgagatgtgaaagaagaggggaagtagaaggaaaacagagctgctcaggctctgctggggaagactgggtatgtagcagtgccttcctcctggccgagaatgtaggaagagaaataggtaaggaggaaaagatagttttttactctcagtgtcacattaaaatggaactctctggtcaaaagttgaatataaatctctgtaggctaagtccatttgtgacatcccaacatatgttttcaaaaataacatacacactaaatcaagccattaagcgtaactggggaaatttcctaaaatttacatgctaaaaaatcaccatttttcatttattactttcatggagcaactttgaatctatggttacagcaggtgaggcaccttgtataaaataaagctaatacatgaaataaaaccatttaaaattctattgttctcagagaatggagaaagcaattgaagccatgggtgtggaggtgactgccttgagaagttgtgtatagtaaggagaactgggaagaaagaagacctggagaatagggtgatttgcacggcattaagtgaagcttgaaaaagtgagcactgggagtcaagagacatgtatgaatcaggaatggctgctcctgtgagttgttagaaaggagatgatgccttcttttcatatctataacagtagcacctagcacagtgcctgttcaataggtactcgacatgtattatcccaatgcagagtcaaattttgccaggaaggcaggaaagctacaaattagctatggcaacttagtgattgggcttgtgtgtgtgtgtgagtgagctggatgtcaggcagtgggcaaagtagtgaactggaggtgagaaaacaatgacacaaactcagggcttctcttcccaagtatttggctgagaagagagatgtagtattaaagggagatatgtggtaaaggaagacttttatttcaagattcaacaaaagcgtgagtatacttctatgttaaagggaaagagccaatagaaaaaacacatttttgaggttagaagagaaggaagaactaatgcagaagggccccaaaaggcacaggtgcgtgcaatccggatcagggacagattagctttggattcctacaaaagcaagaagggagaaaggaccatgtgacactagagctatttctggtaaaggaaaggtttgggaaaagatcttttgatcacctttattttaacagaatgtttttttttttttttgagatggagtcttgctctgtcacccaggctggagtgcagtggcacgatctcggctcactgcaacctctgcctcctgggttcatgccattctcctgcctcagcctcctgattagctgggactacaggcacccgttaccatgtccagctaattttttgtatttttagtaaagatggggtttcaacgtgttagccaggatggtctccatctcttgacttcgtgatccgcctgtctcggcctcccaaagtctgggattacaggcgtgagccactgcacccggctagacttaaaaaaaaaaaaaaaaatactgtgggaaaaaggatattatgtatagaaaagtctacacttcttgatacaactaactaaaaaaagcctgatacactaaacaaaacccaaataatgtcttccctaaaagtgggtaacttgaaaagcaattcgagcaaaaatcaaggagttcaattataaataagtatatcaacaaagtgaaagatgggtttaatttttcccacaaaaagttaaaagaaataacagcagttttagaggaagaggaaaaaataataagaaaattacatgcagttgcaaaatgtgtgactatttacaaactctaacatataactacaaaacggaccagaagaatcattatcataggaagcaaagggtcatttcaaaaatcagaggagggatgattcatatttaatttaattctgtggaaaaaatttaagtaacctttgaggacaaaaataggtgatatgttgaaatgcgggaaaccacagtggaaggaaaaagaattcaagaaagctcagtttcagtaaccagtatctagtaaaatcttcaggacctagaggctacaatctgcattaatagtgtctgaagacctagaaatgtcattaaataccattttggataattcttgtagacttgagatgatgtctatttaaagttacaaaatagtgcccgtatttctgtattcattacagacaacaattggatatggaaaagaaactaacatgctatgccacaatctctaaagaaagattagggatgtttcagcttaaagcaagaataatcacaataaagttttacgaccctttgcaagcatatatgaaaaacttacaaaaagtttgtaatgatcttttcttaagctaagagaatggaaaaaatgagaaaaattaaattataaaatgaaactttggtttagaggtaagaaacatttgatgacagtcaagagatcagggttgtacagtgtattatgtgaatgttgtgactcattggtttcatcttggatatcataacttgacattttgtaaaagtgatttttcatgggagttttttcaggtgccctgaaaagtcctgtcccatgagaagcgaataatagtcttccatattcttgcgatatcttaatgaatagcatcttctacagtcttccattgtttagtccttggagagacactgactgaagctgtgaggtttcacaatgacatgtcagccaaatacatatgctcagatttaccatttatcaagaggtcttcacactatcaattgtgcaattatcattctacacacaggcagtgataaagggagtaaaaaaccacagccatggatcgggagaccaaggtacctccagaggagtccagtgggtccagaagccctttggatgttggtcagaggctcctcttgggcagagatcacagcagcagccaacaggtctggtgaaatccttaagagttctcatggacaaagcttgtgaaggcatcttagacaagatcttgtctttgctggttttatgatcctctgcagatgggtctattctcattatctcagccacctttcacttcctatcagttcagttcaggtctctcatgatcccaggcagcagtagttgttatcacgtgagttcattcatatatgtttatctctttggggatggggggacaacttcactgtggacttaattctactggagatgagtgaccccattttaagacaacaggatcacaaattattatcacatatcagcagggcagacaatagctacgacctggggctgaaagcaggtaactccatttatcctgtaaacattgtcttgattatggtgccagttgctgtgagggatttcctttccaccacctgtttttcacaaggtttgagtctgaactgctaacattctactgatttctgggtgaagggactgactgcaccatcctaccctgtcagagcacttgccccagtacttccactttaagagttttccaccttgtccagaactacagtccattaatcccctcattttctctcttaagagaataaacaggccaggcgcggtggctcacgcctgtaatcccagcactttgggaggctgaggcgggtggatcatctgaggtcaggagttcgagaccagcttcgcctacatagtgaaatctcgtctccactaaaaaaaaaatcacaaaaattagccgggcgtggtggcaggcgcctgtaatcccagctactcgggaggctgaggcaggagaatcccttgaacccgggaggcagaggttgcagtgagccaagactgtgccacagcactccagcctgggtgacagagtgagactccctctcaaaaaaaaaaaaagaaaaaagagagaaaataaacaacacatctcaagtacacacccacatccctcttatcccaaataccaaacacacaaaaatccaatctgtctccttctacctaagcaattttagatagtcactgtctcataattaccttaagctccctgacttgctgctcatcctttctctggcaaaatctcatccttggatgagcccgactttgtgtttgctcaatgacaccactcacctgaaccagaaaaaatatcaaaaagtggtcagagatatcatcataaattcaaattacttacacaaaaaattggccctaaatgtttccagaaatcaataaaagttttgtttctccaatgacatcatttcttcagaaacccaatgtgtataacctattttttctatgttcttctaacatttattcaacttctctcatctgatatcttgccaaatcattcaaagagaaaatatatcccattaggcaagagcccaccatattcccatcacctgagaaaatcatatgcacaggatgcacccacctcacctttctctgcctcatcatgtcagaaaaagtaccccaccttttgtcacaaggcaaacctgagataaaagatttagatggcctgtaattccagcacttggggagaccaatgcaggcagattatttgagtctaagagttcaaaagaagcctaagcaacttagggaaactgcatctctcaaacaaatacaaaccattagcctagcatggtggtgtggtggcacatgcctgtagtcccagctactcagggtggggagcactgaggtgggaggatcacctgagctggaaggttgtggctgcagtgagccgtgatcacgtcactgcactccagccacggtaacagatatttttaaaaggatcttctctgttaaaaataatcaaataaacaggtggccatgaggctgaggtggctgccgtgcactcaattcctccttaaataaaccaaaacttgactcagtgtaaataataaaaggaaatgtaagaaccaatcagaaaccaccaactaacatctaactagagaccttccactgtaatgttccaaatgaggccactgctccacttcacccaatcaagtattttctttttcttccacattcaccatataaaattcttcccccaccctccctaagcctctctgtgggacctctgagctgcttgcagtctggggctgcctagtttatacatttctgaatgctcaagtatattttctaatgtttcaaagtggctctggtgtaggaggttgttggtggagtgacccgagagtatacaggaattgagggcatatgagatctctggactctgcactccattttgctgtacactcaaaactactctaaaataataatatatctttaaaaatctataactagcacgtagcccttttcaagcctccaactggttggagccagttcgattaaagctcagaagaaaaactggttaataagctagttctgacccaactggcaagaagcggcaggaaagacccaggccaggggagcatattgcacatgcatgcaccaggaaactggaggaagcttggaggccctttagcctggtcctgagcccgctgaaactgcagttacagcacagatgcctggggcaccaatctgaatctgccaacatccaaggccacatgaacacaaatgcgcagtctcctctgcgatcggtagctaaggatgttaggccatgattggactaggatgggagatgaactgagaactatggattctgtaggttgttgttgtctcttcccaccccaagcaacaagtgatgaacacacacacacacacacacacacacacacacacacacacacacacatcccgtagtgactaacaggatctccctccaggggatttgcagaaaggggagcagaaaacatcccaggggcctttcacagctacttccttgagccccctttcagactgctgtctagacctgtcgcagcccaaacatcaccaccctgatatgcagaagctggcatccttacctgaaattcaacaccaagaaatgatctcttctactcaacactgatagaaatacctctaagcaatgtcctcattggcaggggtggagtgggggagtttcttaaaaagtgaggcctctgcctaccacctagagaacctggaaatttccatctgtgccacaaagtccaaatcactggccactgccccagtgtatggcagattagaacatctctccattagatctgggtttctattccattgagtgaaatggcttttctattacaggaacagaataagggatcaaaagggtcttacaactgaactccagtgtacagtctgcacagacactaggcttgtgcaaatatgacacagcgaggccccaggacccttaagccagctgaatgtactgagtttcaggaaacagtgagatacgttcagcaaaacagtgggcttcatgctgaaagaagtcattccaagtaaacacacatcacacacacacacacacacacacacacacacacacacacccccgcagacaccctagtggccaataggtcctctcaccaaaaacctgtgatcaggagagcagaaagcctcccaggggtccatcactgccctttctggagccccttatcagatggccagccccaggacagcactgtctgatcctggtccagtccaaaccaccatcaccctgtgatgtgggagctggccacttcaccagaacctctgtgtcagaaaaatttctcttccttttaaaatgatgagggggaaccttcagacagtgtctgattagggtgggtggagagaggggtttcctagaaagtcaggcagggcagggctgaagccctctgggttaactgagtgcttttgatatgaaggcaggtaagactggacaggtgggggtgttagtgaggggatggtgtagggtgtgctgaagaactccacttgggctctccacaccagggaaaatgaccataaaacatcccatcttcactgctcagagaaggctagatctgctgtgagctagaaagccatgtgggggcagctgatgagtcatcaaatgggagaaatctgagagccatgtgttccacaggcctctggtccttgttcaggcagcagggcactgtgacatgtggctccttggccccttccagccaccaccttgattgcatgctgcagggaaagagactgaagaccaagaatggggtcttgctcaccatgggatgatggctcagtacagagctgagctatgtatggcccaagaggcagaatgtggggatgacccaggctgagctgggggatccaactgaacatgcacttgctaagaagctgtgggctatgatgccttgggaccccagtctgggtctagaattgtagcaaaacaggctactggtaaaagttcttgagaagccaactcacttttgctgtcatccatgggcaaacaaaccaagccccaccacttcccactccctctgaaagcctcctgcccctctgatcgaccacaccacaatggtgtcactctgtaaggcacaggtagacaaggcatccagccatgaacactccagggcgcacacatgtccagaatacgctggttcttgttgagactccactcttccaactcagacagaagctccccaatctcctcagccactcccaacaactggaggtctgaaaactttcatgcatgccgctatggtctaaaccactcgtggcggttttcattttcattttcctgataatcagtgatgctgagcacctttccatatgccttttcaccaactggatgccttctatggctaaatgtctattcgaatccattgcccatttacaaatctgcttttttgtgggcttcttgatgtttttctctttttttttcctatttatttatacaagttccttaggtattttggatattttttaaaatcattttcaattccactgcccagttataatttttttttttttttttttgagacggagttttgctgttattgcccaggctagagtgcaatggtgcgatcttggctcacagcaacctccacctcccagagtcaagcaattctcctgcctcagcctcctgagtagctgggattacaggcatgtgccaccatgcccagctaatttttgtatttttagtagagatgggttttttccatgttggtcaggctggtctcaaactcccggtctcaggtgatccatccacctcggcctcccaaagtgctgggattacaggcgtgagccactgtgcccggccaattatccctttttgtgtttttttggggggttgggggaagaacagagtctcactctgtcatctaggctggagtgcactggtatgatctcggctcactgcagcctccgcctcccaggttccagcgattctccggactcagtctcccgggtagctaagatcatgggcgcgcaacacatgcccagctaacttttgtatttttagtagagacagggtttcaccatgttggccaggctgttctcaaactcctgacctcaggtgatccgcccacctcggtctcccaaagtgttgggattacaggcgggagccaccactcccgaacccattttgtgttttaacatcagtcaacactcctattttaaaataataacaatgaatggcggtaccttagaacaaaggaattatagatctttctcttgtcttagtgcagacattttgtctataaaatgttattcacagatgaactcatgagaacattactgtgaattttaaatccatatacaagtgtatgctcattcatgaatatttcaataaaataaaactaatagcaaaaaagaattccagagttgaagcagtttcaggaaaaaggagttggcagtatgaagtaaaatagcaaaaaaaattttttttttaaatgggtatatttgtgtctacaacttttttttaattatagcattagacaatgtgtatatagatacgtatataaagcaatggaagtggcattgttttcatactagtctagaatattaaaaaatatgtaatatgtgatcagcaaaataatggccccccaaagatgtccacagattcctagaaccttacatgaaaacggtacatcatgcatgtgattcaggtaaagaccttgacatgaggagactaccctggtgctatggaatgaacgttgtgttccgtcactgttcatgtgttaaaatcctaaccctcaaggtgatggcattaggaggttaagccttacgggagactctgccctcatgactgggattagcaccttattaaaggcacaagggagcttgtttgttcctctcaccatgcgaagacacagcaagaaggaagcctctatgagaaagcaggccttcaccagacaccaagactgccggcaccttgatcttgcacttctcagcctccaggactgtgagaaacaaagttctgttatttataagctacctggtctaatgcatttccttgtagcagcctgtatggattaggacagtgggctcatgtggatgatgacggtgtctccattcaggactaagtaagcacatgagtccttaacagtggaagagaagggggaaggaaagagccacagagacatgtggccatagaagaagggcccatgggatgcaaggttgctaatggtgagagtggagaagagcccaaagccaaaaaatgcaggcagactccagaatgtggaaaaggcgagaaaaaagatcccctagagcctctagagatgaaggtagcctttccaccacctagattttagcccagtgagatccacatcacactctgacatacgggagtgtaataaatttgttttatgccctgacatactggtagtttgttgtagcagcaatggactagtaatatataaatatatatatacacacacacacataaacactacccccaccaccacacacacaacataactatctatatataccccgcccttcaaaactgaatcagataaactacacattagcattaacttagctgggtgtggtggcacatgcctgtagtcccagctacacaggacgctgagagggaggatcacttgagcccaggagtttaagatcagcctgggcaaacacactgaggccacatttcaaaaacaaacaaaaaacacaacaaatatttgattaagctcatttcccaaatttgaagaggaaacaattattagataaagaggagaaaagagaaaggtagagctgctgacttctgtggtggaagcacaggcacaggcccaaacatactcctgtcctcctggctttcctgtcccttctcataagggacacaggaacctctcaaactgaaccatggatcacagaaccatactcagaacgcaatacagttttgtctacaattttttatatatctgtgtccctgtctctgcctcccattcccaactcccttactcttgttagaaaaaaatggctattatcaaatatgagtacatccttatatactaatgccaactgatcaccagctggttttcttcttttacaaagtcataaatatttaggctttaacacatcttccaagcaatagaatgttattttccagttcattaacacaaattctatatctaaaatgaagacttcacaagttgatttaaataacatattaacgaaaatcgactggccatggttcaaactgacattttaattaaatgtgatgataggttgagtaacctagcagtactctaaaatgacttttggttatggctttttccatattatgcttaggctgaggcatccctaaatgattcaattgtaattccccttcttaaacatgagatttatctttacaaaataatttattttcttaaaattacaagttaattctatagttcatgcatacataatctcagtagatatcagctgtatgtgtacacacatacatataggtatttgtatatacacatattacataatttaaaaaaaacttattagcagggtacaaccacgaagacaaagaggctttgtgtaatgtgatggaaacacaactgcaggacaaacaacaggctgctgtgagggctgtatttaccctttctgatgtaagacttggaaaaacatggatactggatatctaatccccataacagaaaatttagggtgcagaaaacttcccacaatttttacagacaatgtcaatagaaaggcattcaatgcagggaatacacagtgtgacagtatacaaaaataagcaggttgatggtttagatttatgagacaagagaaagaaatagtagatgatgtcataattctccttttatggagttatgaaaattcttcattttatataaggtcaggtgctttcaaatgtcaatgagaaaaatatttaaaggaagaatcaaatctaagacgtagagagatctttataaatgtgaacttcaggccaggcacggtggctcatacctgtaatcccagcattttgggaggcctaggtgggccaatcacgaggtcaggggatcaagaccatcctggcccacatggcgaaaccccgtatctactaaaatacaaaaaatcagccaggagtggtgacgtgtgcctgtagtcccagctactcaggaggctgaggcaggagaatcacttgaacccgggaggcagaggttgcagtgagccgagatagcactactgcactccagtctggtgacagagcaagactccatctcaaaaaaaaacaacaacaactttttttcatgctgagaagatataatcatcaacacattcttgagcacaactatgcacacaggcacttccgcattcacaagccatgctgtgtgcacacactgatgcccctagattccttttttgaagaggtggtctcttggtgtgtcacccaggctggagagcagtgttaggatcatagctcactgcagcctcaaactcctgggttcaagtgatcctcctacctcaggctcctgagtagcctgaactataggaatgagccaccatgcccagccaatattttcatttttttgtagagatgaaatcttgctatgttgcccaggcgggtcttgaactcttggcctcaaggaatcctcctgccttgccctcccaacatgctgagattacaggtgtgaaccattgtgcccagccaccggattctttattaagaagaaaacttgtttgctgacatgtaggcaatgaattgatgaatagtagttcataaattactaatttacaagtcaatataaatgagttgagtaaacacaaaataacagcataaattaataaacagtttacgacctcaagtttctttttttcctttaaaacattgctctgacagagactactacttgtccattccatggaaaagtcagaggtggttaaaatgtcagaggtacacttattaacaccttgctgccttttgtgtagcttcctctcagtacttcaccagttgggattgacacacctctccagctgggttcaggagccagacaggagcacacagaacagggaatccaaagccatctctgacaccaaaagcaatgaaaacaaaaataaccaaacatattatcaagaaatgaacaagagatcgatatcaagtacagcaaaaagagaagaaatcacttaatctgccaggctttcattctgacaaaataatttacaacacgcatgtctctatctgacatgtgtgaatagaaaaataagaggtgacaatagagtagaggattcgtcttccaattgtctctgatctatccaacctttgttacacatcagagagctctccaatttataaataaacaacagagatatgcggcaaccaggacacagagacatactgagagtactgctcagctctctgcctaggcctgattctgatgatccctgacaatgagcactgtgaaatttacagcaaatcagtacacatacacacaaacacacaaaagagatacttcatgggcaaaaagcatcaaagatataaaataaaatgcctgaaagaccataaaacaacttctgatgaaatgctgttttcattttgcagtagtaaaatattcaccaccaaatctacaattagcttaaaaattacaataagtacagtacttttggatcccatctccaattcacaccttatcaacatgtaataatcacactgcatctacaacaaagctggatggactttatgtgctgaatacaacttgtacactaagaaggaaattttttgaaataatgagaatacaaaatttgtatgccatgctctacttcacaagttaaaagaaaatacaatcatttctatttttaaaatgcatcgaaataaaatacagaaaagagtattctaataccagttaacattaagagaatatatctctaaaccaaagatcttggatcttctagaaagacaaaatcagctggtatatatttggataagaaaaaaaaattaagagatcaagaaaggagagaagacgttcgcacagaatcatctccaaaaatggctttctgacgcattcgaccagttttcaagtctatttgtttttcctcctttggcatcaacagcctatatcaccaaggatatgcaaaataattcaatttgtacattaatcagctaatctagaactggaaatatagtcaatgaaaatacaaaagaaacagaaaatgtcaatgaattgcttaagatgtttaagatgacatagcgtagggaaaaaatgatctgataaacaccggaagagttaataaggaaactgaggcatggttccctaacaccacacttcaaaagaacttatagagagaataaaggaataacccttaaaaaaaaaatctaattttagaaaaaaattgctcaaaagggaagttagggttttatagatcttctggaaagctgattaatttctaagctaaaaacgcatgatccttaagagaaatggctgagtccaggcccaaggcaggaagaggacaaaatgagcctggatcctctggttctgtcagaaagtaagaaatgctcaaagactaacagagacagttgaagggacacaggagacaggccgaaggctcccgcagccgaatctgggacagcataggcatcagaaagtacaatgacagtgatggaaaataacccatggaataaaacgcaagtgcattagtcagccgtgatgctgaaacaaaggggagaagagaaagctctttgttaaaaatgccaggtaacaaacttagaaggaatgacagaggaataacatccattttgagtcaccagtgccataactgatagagaagattatcagggggctaaaatcactggatgaaagaaaactatatgaagctttttaacgtagcacaatagataaaagtatgaaaacataaattagaaaaaactaaaaatcataccataagggatggataagttagaatacaggaataacaggccaggcatagtggctcacatatgtaatcccaggattttgggaggccaagtcgggaggattgcttgagcccaggagttcgagaccagcctaggcaacatagtgagaactcgtccctagaacagaacaaaaaaaattagccgggagtggtggtgcactcctgtagtcctagctacttgcggggctgaagcaggaggatcacttgagcctgggagttcaaggctgcagtgagccaagatcacaccactgcactccagcctgggagacaaagtgagaccttatctcaaaacaaaaacaaaaacaaaaacaaaaacaaagaaaccacaataacaaaaaaacactggtaacaataaaatcatgattacataaagactgtatagaaaaaaaatcctcagaatatagaaataaaattatgtattttacctgtagctatattagaagagagtattcttgtagacaaggatgactagaaggatatgcaaaaatgaaaacagctaataacactcattacgtcaggcactgtggtaggtagtttatgcacattgtaacaaattatatactacattatctcaagattttcagataaattttactgggagtcataaatcaatacaacaaaatcaatgttttgcaaacatccactaagcataaaggtatacaaattcccaacccagactgaaaaataattcacataagccacacattagtggaaacctacccatgggagataatacaacataatctaaataaaactttcagagacaaggcatgtggcttctggacagccacaaactccctgactctgctctagtgtttcggccatcaaaagaaagccaagtggcctcaggtctctgaaaaaccaaaaaagcaacctatggaagatggcgtggtatttgaggaatatttgaagtctgttgaaaaatgcatcctgtattttttttcaagataagactcccttgtaatgtcaggtaagtgaagagccctcagagacacatgcacacacaaagaaaaacaaaacgacatagaatgaatcccaccaaaatgtgttatgatggcagaattatgggtgatacaatcttctgtaatatatctttttattaaaaatagaaaaaaagcagacttacccttgattatctatagcctctgacccaagtggtttggaattggaaagcagcgtcactcgacttgaagccatcttggcatcaatggtggagtaggtggagatgagactctggaccagctcatgggtgagccccaccttgtcctatcaaggccaccaagaaagggcacgtgaggaaagcacaaagatcctggagagacactggtttcactcagtttctcaaaattatcttagacacatttcctgagatcttttcttaatgccacaaacaccagagaagaaaatccttataacaaagcttgaaatggatccccatctccattaaacttgtccaaagctcagtgagtatataacctgataacctaaacacctagctagaaaaacctcagttccagtgctacaacagtgctagcttttctaacatttttaaataaccctgcttttaacccaataaaattcaactacagaactaagaaataaatattggaaatccactttaaaataatgaggagaccactgtgattgagaaaaagaaaaagacaaacgagagctggaaagcacactgattttgtagaaacagaaataagccgtgcaggtgccacactggcagcagtgcccgcgctggggccacggatcaaggaggcatggaggacaggactcttctgcttggtacaatgaaaaaatggtattctttttattctacatattgacaatatgcatttgggcctttattataagtacaagagaaaaatcttcaataaataaaagctgagtacattactttttttgattaaaaaatagattaggaaagaataatgagagttcagagcaaagactcctgcctcactgatgcctgaaaaccgtggctgccaccaaggtcaacacagacagcgtctttgtcatacagcacaccctcaactccagaaacaggcacataaaccagctgctccttcttatttaaacagcacttcttttgttattcaggaagaacacaagggtctgggaggaaaccgatgtcactcatggcaaaatgttctacccctggaagacgggacccaaaaagccagcttcaactgacaagaagtcagtaagtatctactgttgactggggggttaaaaacgatccacagtccaagggcttaacccatgaccctaaagaagggcattgtgccacactggaacagtggccctctagctacaagaggtcagagaagagggattcggtaacacctttgcaggcctacacatagctggcttacttttaaaacctccagcaaggccatcttcccttgtttggtcatttttcatttttcctgagaaatgaagccatcccaagaatcctatgtgcaattctagtatgttctacaacaagagaatacctggcatgtgaatttggcttttatctttgaagtgtgctcctcttaaataaccataaagtgacacctgccggtcacatttgatgtttgtttggatatcctccgggtttgtcaaatcttccatcctagaaaaataaactcaatcatacagcagaaacgaatgccaaagttcctatacctcctttcatgtgtcaatgactcatcacactcttgtccactaagcacatcacttaggaactagaaaatgcagaaataaggaagcaccgttcaccatccagcagaggaaaaggggcaggcacacaactgtgtctctaggctgaaagtgacattcattccataagacaccagatgggagacgacgtctacctggggtcagggaagagtgaagaacatatgcagaaaatccgtttctggaagagggtgagcctgtgctctgggatttgtactgtggcttggattctggcaggtggaaaaggggtattccaggctgagaaaatcacagcacaaagaagagcacaaaggaaggaaactgaaggcacgcacgaaggactccagcacccgggcacgaaggcagcatcactgaaaaccgaggctgaacgtaggatggggccacatcctgtagccttaaatgcttccaagtcctcccattttcctaaacatctcataattaatttactcccaaaggcacagcatctttgagcaatgatataagtagacattttccatcaactgcacttctacccccactattcaaataggcacaaaataaatcctatcactgttctttttctagcctttttagctttgaaatacatggcccaggaagaaaaagtttacaatcactttttacctgtctgccaggatataagggtgaaaagtttgccatgagaggcctaaacttcataactgtaataaaatggcccagattgtggatttcttggttttgatattctccatgcaccattccagaaaggtagaacagtttggcaacctaaacattaaaggaaaattaaaaattaaatttcaattaaattctcgtcaatactgcaacaaaataaaagctctaaacaagaagcaatcctaagaagggagacttccagcaaagccactgtcctgaggcttccagagccttgctggattctttcaggacttattagaaccacacagaggcagactgctctgcaaccaagccggtgcatctgtctaagtatggtgaggagagggaggtgaggcctctgagcacagaaacggttctgtggccgatggaccacagcagtatggaaaggaaggggcagtgcctggtcctgtaactgggagaaacttctgatgtactctattaagtcccgactccaaaacacccagacattgcctggtgcagcaggtacggagacaaatgagatacaccaagaggcccagaataaccactctcttgagggacaccttccagagactgggaacacatacacaaagggaattcaggaggcaattcctagagagatgtttagtaatgtctcttcagtctttttgtttgtttgtttgtttgtttgtttgtttgagatggagtctcactctgtcacccaggctggagtgcagtggtgcactctcagctcactccaccctctgcctcccagctttgagcaattctcacgtctcagcctccctagtagctgggattacaggtgcatgccaccacacccgactaatttttgccttttgagtagagacagggtttggccatattgccctgagctcgaaactcctggcctcaagtgatccacctgactctgcctcccaaagtgctgggattacaggcatgagccactgtgcctggcctctttagtctggttttaaaggattatactgttagtgtctaacaattatttctcttcctacctggtaaacttctgtccagaacctgtgttttaatcgcttctttgtcttcttcagttgcttgttatgcttgaaggagtcgaggtgggtgagaactcccagaattttaggaaagccatgtgcttgacagatgtttagaaactcaaacatttccatttcaaacccaaagctggcatctataagcatcagtacctacaagcacaacacattatttctcgaagaaactaccaaaacagaccacctacactaggggttggcaactggcccacgggccaaatccagcccatcacctgtgtttgtaactaaagttttattggaacatagccacattaattcctttacatattgtctatggccgcctgtgcactacaactgcagagctaagtagctgcagaagatatgatccacaaagctgaaaatattcactatctggccctcgacagaaaagtcccactccagactaaatcaaatgactacacaggcatcacccagacagagaaaccaccaccctctgacttgctctaaaaggcaaccataagacaaggccactaggatataaacatccattttaagaattctaatgcatgagaagtaactcagaaaaggctgggtctaacctggcccttacctaagaaatcctaatttaaagaaatgaagttttctgtaatgtatttttaagccaaataacaggtctctgacatccaaagaatgggaagaaagtgataatcaatgaaatatattaaatacgtacagaaaaccaacctcttctttcaatctcctcacagaaaaaaaaaaaaaatctttttttgctgggaagtatacaatggaaacctctaacttgtatgttaatttgtataactcaattgctcagaaatatttgaaatagctaccagtttagaattaagtaaaaaaacagaaagattatgatgaatggtagtctataagaaaatataagcagataagaccaatttttttttttttttttttttttgagacagagtctcgctctgttgcccaggctggagtgcagtggcttgatctcggctcagcgcaagctccgccccccggattcatgccattcttctgcctcagcctcctgagtagctgggactacaggcacccaccaccacacccggctagttttttttgtatttttttagtagagacggggtttcacagtgttcaccaggatggtctcgatctcctgaccccgtgatctgcctgccttggcctccgaagtgctgggattacaggcgtgagccaccgcacctggccaagaccaatttttaaaatttaagacacttcaaagatgcaaaataatttcagaactgattcctggaaacttgtaattttaatactaaagatagttctgtttctatctttccatggataactaaaaataacacaaaatggaaacagaaatgcccatccttgattaaactaggaaacattcaaaacccaaaaccacagaatatatgaagttgggcttgtaggaaagcacagctgccactgcagaccaaggcagcaagcagagctctccagcaacactggaccagctcaaagaacaggtggaatatcctcacaccacatctgatgccagagtgccaagggacaagcagctggttgtagggtcaggaataaaagggagcaaacagtccctcagctgccaatctttgccatctaagccagtgtcactcccctaatccacacacgcacgtacacacccaaatccacgtactgtgtgtgcctctgctgtactcaggaggctttgacaacccagagcagagcaatcaacataagctagactaaataaattatggtgcatccacagaatggaatgttatattaaaaagaaggaggcagagctacagtacttactgattatacaccttcaagatatattacatgaaaaaagcaaagcatagaacagtgtataaaataagctaccgtttgtgtttttaaagggtggcatgtgtgtttatatgtatctggaaggatatacatatacatatacatatatataaaggtctgcagggacctgagagaccagaggttacagcaaggaaagagaaaatgcgcattgtgtgtaccgtgcattacagttagagtgctttaccaaatgtgtgtgctccttttgaaaatcttaagatttacataggcatctctctcaatgatggttaagaggctgggaaggggagcagggagggagggacaaagagggaaaggttaacaggtacaaaaacacagttagatagaataaattctagtgtccaacagcacaatagggtgactataatttattatataattcagaataactaaaagaatgaaattaaaatgttcctaacacaaataaatgataaatgtttgaagtgacggatctctgaattaccctgatttgatcatcacacattgtatgcttctatcaaaatactacatgtaccccataaatatgtacaactattatgtatccataataactaaaactaaaaaaatgtaaatgcatctcttaatatgtatgtgtttaaaattagaaacttgctacattttaaataaaagagaaacaaatgacttctatgaactattcaatcatttcaagtatacaagtttagtaatctttacacaactttacattaattacacttatttttactaatagtagcattacatgttcaaaatttgaatgttatttagttttctgacattacaatggcacaactttaaaatctgtattactttttcctttatattttaggagtcttcctaggccaaagtataaaatctgtagctctagcaaaaactaaataaaaatgaaaaaaacaaggtatctgtcaccctacacctcctaatcaatatggcttatttttttgctaatttttttttttttttgagacagaatttcactcttgttgcccaggctagagtgcaatggcacgatctcgcctcaccgcaacctccatctcctgggttgaagcgattctcctgcctcagcctcctaagtaactgggattacaggcatgcaccacctcacccgtctaattttgtatttttagtagagacggggtttctgcatgttggtcaggctggtctcgaactcccgacctcaggtgattcacccacttcggtctcccaaagtgctgggattacaggcatgagccactgtgtctggcctttttttctttttttcttttttttgctaatgtaaaagatcatagaatatcagagatagtgaacattatcatttccataaatgtacattttccacacgctgagtactatctaaattttctattgataaactctgaccacttcttcaggcaattcatgtacttactttagcattatcattaaggatgaaggttctagaaccatcaggaacaagggtcccatcttcacacaagttacttaactgctgggaggctctatttcatcttatgtaaactatagataatacctactcacctcaagggtgtatcaagggtttatgtaagctaaatttgtagaaagcagttagcacagtgccaggaaggatccaagaagaaatggtacttactatgatatatttgtacatatatatgtatgaatgttaatgagctcttattagctgtgttcattaaaggttttctccatcctgtgatttgcttttagattttggaacacatttcattgtgcacattccatttgtattattaatatgacaacatttattactaatattattatcatcatcaattcaatcacatctactatatccctgataatgaccatgatccttttaataatcacaaaactctcttcccttcatcacggggtaaataacctaccacaatgctgtaagtctccatcagcaccccaggctgcccctgctcacttaccagatctgctactttagccagatcaatcatcatgttaatgtcacacccacattcaataatggtgagtctgcgctttttacctataagtgaaaagatgaaaattttactttaaaaagaccctgaaaaaactctaaccatcaactcttaattttcattttttaattgcatccagtaaaacaccacatacgtttacaggagtgtaccagaagttcatttttataggcaaaaactggtaaaataaattccatcctgtttttcttcctgtgttctaaatttagataatatcaaaagcctacccagatgaataaaagtgctcaaaacagggaaaattctgactagacaggctccacgataaccatgatcttgctgttcagctgcaggccaatgtcttcacctctatcaaaatttcctgtattcccactatcgctaaaaacatcctcaaacataatgcaacagaatatttacaatgataattatttctaaattaaggtaataagaaaatgatcaagaaaatattggctgggcacagtggctcatgcctgtagtcctggcaccttgggagaccagggcaggtggatcccttgagcccaggagttttgagatcagcctgggccacatggggaaatcccatctctacaaaaacataaaaattaaaaaaaaggaaaaaaaagaaaaattagccaggcatggtggcatacactactcaggaggctaaggtaggaggattgcttgagcctgggaggttgaggctgcagtgagctgtaatcacaccactgcattccagcctgtgccacagagcaagactctgtctcaaaaaaaggaaaataaaatatggatgcgccaaagataaagaaaagcctcaatccaactatattactgcaataataagagatttcagagtgtacattgccattctaccactggacgtttgtttcatcttccctcaaacttggaaaggtcaccatctcccaaagcagacaaattctcataggaaaaagagaaaacgcgcacttccaccagcatgtggcttcataagggcaagcatgtgcacctggcacataggaggtacgtgctgtctgttaaatggtgtgttcgcagtgaccaggcctgtcaggcccttccaaggaacatgcttggcaaagccatagagcagtcaggataaggtatgtatcacatccttatctctgggaacttatccttttatgaagttatagctaacttagtaaaagtaagagagaggtaacatgatatgacaatatttaacatgttccactcaagaaaacaacaaacacacgcatgtccctcagatgacaacagccacgccaagtctgtgtctgtggcaccatctcctacctgacacgatcgtcacagggcctctgatctcggtgaacttctgccaggtgaagttccgaatgaggcattatatcaaagtgctctttccaactttggaggccccgtcaccactaccggtattggtggcggctctagtggagttccatcaaccactggaatatgatgcttttgtgtcttcaaatccagagtcctatttatttaaaaaagaaaaaaaaagtaaactcacttttaaaatagagtaaaaggtatcaaccttataagtagacttttttttagtataattacagatatgagtactttagtatattttatagagagtacaacagacaatataaaaatataagtaacttgtcaattattaacttctgacccctatccaaatcaattgctgttcaataaagatgtaacaagatgacttcaatagtatagagttgaaaattaaacacaccttaaatctgactgctttatgagtgatttttatagttttttaaaaaccaaaaggtaaatactgaggcagtgcatcataacagataagagcagaggctctggagttaaatttggctctccgacttactggttgtatgattggaggtaacttgttttcttgacctcagttttcttgtccataaaatgagggcaagaatgattcctactctggtaaggctgctggaaggatttagttgaataacgtttaaagtacactgctaagaatatcataaggactcactaaataaagctatgttagtattacatattgtaatttttgtattttatattacaactttgtaaaacatatccagagggaaaaagcacacttatcaccatagaaacagtttaaagtttaggaagaatcaaattctataaattcttgtatcttgggcaagaaacgccaaccagtgtgcagatgctggaggcaaggcagcttctatggcaagtcttctcacgttttagtaaaagccacacagcatgcatctccatgtcctttggagctggactagacttgtgaatccaaatgtcacctgtgagaggctcctaactatttaaaaagattcaatggaagaaccatcagactgtagctaaacacacctgtgaaaggatcgagacatccacacagcagactgaactgcaaaagcattggcatttctcttctgggcattttcttagtctcctagctggagatcctgcagatgccacttctttttctttgcagctttgggtccaccgtttttctttctgtgtttcttctggtccttagtctccatagtggctatttaccaataacaagtaactctaacctacaaggaagaaggttggggtaaggaggtgggagaagcattttacaatccaggcaatacccagggaaaaacattaaatttcatttatttctttatgaagacatgatgtatttgttcactgaacaagggtagaaactgcttaaccatccccaatttcatttctctctgttatgctataaattagatgagttacctctgctaaggttacattctatggttaagttactttttattcatctcaagtgtcaacatcaccagtacctatttctgcaaggatggaaatattctatatctgtacttttcagccatttagccattagccacatgtggttacttaaaatgtacttcagagaaactgaaaaaatgaattcttaattaatttcattctaactctaaatagtcacatgtggctaccatactggacagctcagacctagacatcgactggactaacgaagtggtttcctaacttaaaccagaacttaaatttcaataaaaaatttaaaacgtttttatgaacttccaataggatcgcagtattacttttagtacctgttgactctaaaacttctaaattacagctcatctacatacatttgaaaaatagcaatatctgtatgtgtgagatatgactggttttagatgatgcctggagaccccatggacttacagagacccttccagtgatttctgaggtacctgggaatctgtggccaataaattggtagtcactgaatctgtgagtttttttggaatatcgggctgcataaaatctgacagcttgattgagaaaaagcggggcagggtaccatttcattcagttaaggtcctgtattcattccgtttaataaatgtttgtgtctgtctatgatgtgctagccactgtgccagaaaatggatatagctatggtctgattggcagaggaaatccaaactagtatcttccgtgccatgcaataagggctacattgcaaggctgcagagggtgctactggagcacagaagtgagtcagaggcttctcacagacacacacacgagcggaaacagaaagtctttatatatcaccatatgtcaaggaacactggccgggagttaggagagctgggcactaggaacgctttgaaactgaatagctgtgtgatttcagaggttatattgcttctctactatattttactgccgaacttgtactgtttctctcccttttcttcttggtgggaaaagcacaatttggggtcaacagattcggctcaggtctaagtcgcctgccgggaccacgtcgccaggaaacgacgtctccccgacaccttccctcccagtccgggctctctgcagggattcatcccgtcactctcccaacgacccccgggcacacctcaggcagatgcgaaatatgccgctcctcgggagcaaagatgacccggaggaccgggggaggaccttcccatgcgcacgactcgcgatcttcccagtgccccagagccacggacccaaccgccgcctaccccagcccgcggcaccaaacctgttcacaactgcgactccttaggtccgcttggacaccgccggaaacggaaattcaccctcgcgccgactcgccggagggaaacaaaaaggcagaaaaaaagggaccgccgcctggatgactttcaggggacagctggaagaaagactcgtcaacggccgagtgctggcgccggcgccgtctgcgcagtgcgttccaccgggtccgcgtccctcccgattcagccccaccccgccctcggaatccgctgcctcagctcctgctgtggcactccccagcagcttgcacctcgctcgcggagtccttgctgaaggccagggcagctgtgcggcctggcgcgggttacttgatgccgtgcaaaagccaggagacacatttggttctggccgccccggagtcaccgtgcccggggcgaatggactatggctggattgggagtccacttcctcctctgtaaagatgacagacgagggagatctcgcgttctgggggtgccctatagccctcttttggccagaagcggtggatcacgcctgtaatcccagccttttgggaggccgaggcaggaggattgcttgagcccaggagttcaagaccaatctgggcaacatagggaggctacatctctcaaaaaataaataaataaataaataaataaataaataaataaataaataaataaataaaaataaagccagcgtcgtggcagggcgcctgtggtccctgtggtcccagctactctggaggctgaggcgggacgatcgcttgagcctgggaggcagaagttgtagtgagctgagatcgagccactgcactccagcctgggcgacagagcaagacactgtctcaaagaaaaataaataaataaaataaggccctctttttccgggaccaacagactctgagggcagggacaaactgacccagcctaaactgcctcgccttccctgctcccgggaaaggggctttccctgagggaaggtagcatcttgccattttcttcctgcacagctttgccttcccagggatccacccattgccacctgaggaaatgccttggagcccatctaatccccagcccagctacttgggacgcctacagagactacattgtcagaggatgcatcttcctctagtcttggagggtttcttttcaatatgatcccaccggtgcatgcaaggctcaattctacatcaaaaaactaggcccactcctgtcaccgagacccccaggcttcaggtcctgtcacagtgaccttgttatcacccccagcagcccccaggtattcactctgcataggctatatactgggtgctgcactagggaggctacctacgtggcgcatgcttcccttatccctgaagagcttaggatgttgtaacttcttcacactaggcctcttacttcttggagatgtcagtagccgggtaaataatctttctaacatccttttggtctcatgaagcccattcttgtcctctgccctacctcagcttccccctccctccatgatcagaccttagaccttgtcaggtccaaggactgcaaccctcacagtatcccactctgaccaccacctcctatctagagcaatggagagactttgtaggtgaaagctgtctttgctactggttctcctatgctccctcgcctggctcctgcaggcggttgacttcaccagggacacagtggccagtgcccagcaggtcccactcctctcaccagctccaggcagttttattatagagtaactcttctgagacaccgctcctttccccagcacctaaggaagtatttctagtaagttccagtggtatagcatcggtgactctcctgacaagcagagggccatggctgggttcctctgatgaggtgcaggggcagggcactaagaggggaggactctcctgagttctctacctgagccctagactagtagctgctcctcctatacttcctactagtctgtgcctggttactccacttccctgttgcaattaacaattccctaggtacacttttcctgttcaaatgactgtgtggcttctctttcctaatcggactctgaccaatacgctatcatttgccaacaactcccaaagttttatcagtgactcagacctctaacctgaactccagctgcctccatgacatatccatttggatgtttaatggacatttccaaagtgatatgccctacagaactcagaatcttccctctcaaaccaactgctcagcagtcttatgatcttagttgatggcaattcagaagtgaattgcaggacacccggtttgtatctgcagagagaactggagaactgcttagtgtggaaaacccacacatttggtttcagaagtgtgtgagtagaaacagttttccttttatgtttgttggatggataatgatgaacctagcaggacacagaaagctaggcagcagtggaactgagaatgaagttatacttaatagcagagaatgaaaaagaaaagacagataaaacattttgaagaaaggacagtaatgtattcccaacaggtaggatttacaggatggagagaagaggcaaagataactacaaaatttctagcctgagagactggtagaaaaaaaatggtggtatcagggacagacaggggttattaagaaaaaggattggatttttaaaataaagaagatctggtgtaaaattatcctcaggaaaactggaaaactaggcatgtacttctctccatcatgcccttgcacagtgcagtccttctgcctgtccatgcctcgcctccccctccctaggattcctcttcctctcttaagacccatctcaaatatcacctagacttgtaagtaatttacatgaaactggatacctgaggtttcaagcctttatccctttgaaagtttttaataacaagttactgttatcttttactaagtccaagtttatattcgccattttaactagcatcatttccgtttccaagaggtatttggtgtgaaagtgcaactaagtttactgttaatcaagatcagaataaaagaatctaccaaaaaaattaacaagatcccccttttaatgcataatcttccatccatcaggctgtaagttaaatacctaacataaaagaaagctgtatgttttatggatatgtacatatataactgcagggaatatgatttggaaggatatacacttagagaagactggggtcacaagtggtagtcaagggagtcttcagctttctttttgtatttcaattttgacagaaatacatacatatgtattataattttaaatttttaatgaaaaaaagtatttttccttttttttcttgatctgtcactacattatatttttccaatatcagctaaacatttgcttcccagaaagcttagttgtcttttcaaaatttattcaggttaaaataaaagatttagacaatgaattaaaaatctaagatggtatttgcctactttatacagaacagtacattgatgctgctaaagcaattaaagtataatttttattttctttctttttttttttttttttttttgagatggagtctcactctgtcacccaggctgaagtgcagtggtgcaatctcagctcattgcaacctctgtctcctgggttcaagcaattctcctgcctcagcctccccagtagctgggattacaggcgtgcaccaccacgcccagctaatttttttgtatgtttagtagagacagggtttcaccatgttggccaggctggtctcgaactcctgacctcaaatgatctgcccgcctcagcctcccaaagtgctgggattacaggcatgagccaccacacccagcctaaagtgtgtactttttcttagctcctatatgcagtgctccttccccatgctgaatgtctgaatttttatctgagacatagtatttcagatggtcattacttacgggtggtcattaatagttcctccctgcttctaaccttcctctcctcattttaaattaagttacgctacattattgtggattagaaagtacattaatattaagtgaaaaaatatgatctgatgagtaagtggcaagagtgttaacgtatgaatattaagagttgttctgaggcctttttgcttttctgggggttctgtgcttgtggtagaactcttggttattttataaatagttgctgaaaagtgagagagtacagctggaaatcagatttctgatgaataaatcaaaccctattaagagaaccaggttgaagtaattttaaaaccatttggattttcataaatgttttgttaatgattaattataaaaaaaaaacagtgactctagctggaggcttttgtgtgtttgcttttgagtcagctaggaaaaggaagaaaaattcaagcttagtcaattgtggttttcactgaatcttttttaaagtaatgagctggtttgttttcttcatcactgtagcaacttaagctagtttctgcttttgatttttatttctcctagagaaacttagcatgcactgctcattagacttgagcatactaaggaatatctgtggtaattaagttaaaaatcagatcagtgctttgtgctgtgtatagttgcagatgtctgcatttcactaatattctttggaaacatctggataccagttaacataaaataactgtttagttggtttctgttcagaatagaaggaatgatttaaaagttcccattgtagtacatacgtcattctgtccctagcccttcctccagctttactgagatagataaataataaacgtcatgggtggtgtgtcttcagtttcctctggtgagctggatgcacagattactttgtcagcagggtggccttgatttttaggccatgtgtctaatggcatcagctctgtggccgacacctgtgtaccgagcccattcactatctagcttagccagccgtggactcctgctctttgttaaaagtatttaccttcattcctactagcacagttgaccaaagactcagttgatcccagacactagtaatgcatcaatggagtctaacagggttttaagatgtgtgtgtgtgtgtgtgtgtgtgtgtgtgtgtgtgtagaaatgggatctcactattgttgtccaggctggtcttgcacacctgagctcaagttctcctgcctcagcctcccaatgtgctaggactacaggcatgagccaccatgcctaaccctctaagactttgggatacaaaaatataatttactttcctccatttctggaataaaacatctcttccttcctccccctagtttctgttctgtgcccctgtttgatctctgttggtcctgttcaccttcagccttctctgctgaaggaggaaaggcttggttttataaaaagtgacaatattcagaccacataagatccttcttgcttcattttggattaaatattttaagattttctgattttcttgtatgcatatgtatttacctattatttgactttattgaataacttcaaattgagtatatttgaatgggaatgggcattaaaaagggctaagctttccctgcctttcagaactttgtatgtatatgtcacatcattttgtccttcacattctccagttgtgctattttttcccaatccattaagtagagtaacttcctttttggagtcttactttttttttttttttttttttttttttgaggcggagtctcaaaccgtcgcccaggctggaatgcagtagtgcaatctcagctcactgtaaccaccgccttagcctcatgagtagctaggaaatacagaagcatgccaccacacccagctaatttttgtattcttagtaaagatgggggtttcaccatgttggccaagctggtctcgaactcctgacctcaagtgatctgcccagctcggcctcccaaagtgctgggattataggcgtgagccaccacatccagcctccttacttaaatctcttaatgtgccttagaatgtagttaagaattttcaggtgacagtatatttttgatagttatctttggtttccaaacccagagaaggaagagtaactggctttttctgtttgtgggtacattgtgtcttattggagattgttttgtctcaagtattgccgcagagtattttattaatgggtgcactttaaaattttttgtttttcagattaacagtttaggtagcccagtactcggtatttgccaatttctagaattaaaaacgtgtgtatcactggttaactagaaatttaaaatgaaaatgtgtcttctttagcccaggcaatatcacttgcattcacttctatcccctccttgtccctactctgttggctccagggcttcttccactaagctggtactttctttatagctcctcctgtacttccattcactgaacctttattggttcatagcctacagaaaatgcctgtggtgtgagaggtaatttgtgaaactgcttctcttcactgtttagcaggttgagctctctaaatgggtgtagctgggaaagaaaatttaactttacaaacaagaattcctgggttccatccagcggaacatgtctcttgttatacacacacagtttctgacccatatcattccatgacttatgataaaatggacattctgtttacactgttgtgtggaaggagaggtctggttcctaatttttagtaacatctatttctagaatattaggcttgccatttgaatgcttctgtttgatttatgaatatcattggttccagcagtttttagctccctgctaaatgcaagttaaaatttttaagtttctaagttaaaagaaaataacttttcctccacttaagaaagccaggaaaattaaaaataatgtagtgatgacttccacaggctctaaaagagcaatgaaaaaagtgatttatgtgtgggagaagaaatactagttcttaattaatacattgttttaccacttcccgtgaatttatgtagaagtaatgaaaccaaggtttaagtcatttgttcaaactcctgtcagtttagactttttaattgctttgttacatgccattgctttgtaatacttgttatagcagtggtaacagttgagatttgcctgtttgaccacttgcagggcaccgtgccagattccccatgtgcgatgttcctcgcagttgtgacgcccatcctaggagggtggcgttagcacccctccatgcaagcggatggtgcaggctgggtcacctgggcacagcgcctgactattttcctggcttagtgtagttatcattaaatatgtggtattacttagaagcattttgaataatttgaaaagcacattttagtgttaaaacaatttttttttttgagaaaaggtctggctctgttgctggggtggagtgcagtgacctgagcgtagctcactgcagcctgcaactcctgggctcaagcgattctcctgccccagcctcctgagcatctgggactacgggcacatgcccccacacccaactcaattttttttaagatacaaaggattcatcttaatattatttacaatttttttttccttttctgtgggcctcatctgactggaaagcctttcaatttttttattttttaaattgtaaattgacaaattgtagatatatatttatgaggtacaaagtaattttatgatttatgaatacaacattacataattaagtcaagctgattaacctgttcactactggaaacaattgcaaataattatcattttttctggtgagaacatctgaaatttactcagtgattttgaaatgtgcagtactttttgttgttgttgtagaaatgaggtctcactatgttggccaggctggtttcaaactcctgagctcaagtgatcctcccacctcagccttccagtgttgggattacaagcgtgaactaccatgttgggccaaatgtgtaatctattattatttactgtattcaccatgctgtgcaatttatctcaaagaaacttattcctcctgtctaattgaggctttgtgccctttgaccatcatctccccatcacccccatccccaatgttgtatactgagtcctttcatgatatgtatggaggcttatggtaagttatttaaaagtacatgtatgtcaaaattttttgtggccatagcttttctttcttttttaaattttaagagtcagaatattcgtatattaattcagcatgtatttgagtgcctaatgtatgccattttctatgttaggaaccaggaattaaagcagtgaacataacaaagtctgccctcgtggtgctaacttgccaggtagggaagccagatactaaacacatgtataatgcaaagtcagtaataataaacgatatgaagaaacaagtaaggtaggagaggcaggaaagtgggagtgagaaagaggtgctcttttaaatacagtggtcagggagagcctctcagaatgaagtttttaacagagacctgaatgagatgggggagtcagctatacagatatctgctgtgtgctagaaaaattacctgtaattttgcattctaaaagtttaatgagtacatttatttcacaatttgagaatcaattatgtataagatatagttgtaagcacatactcctctaaatatgatttgtttttacagtagaccaaataagtatgttcagcttagaatatgctctttatgatctgtataataaatacattctcttaaaatattgttaatattaaggttgatgttttcagaaacatataaaaaagctagcttttaaaattgactagggaagttctctcaaactgccagtccctgagatattgtatattttctatctgaaaaacttttattctcagaattctttaaaagagctgtccctgaggctcccattacttacctgtgactcccagtggaaatcgtacccagcccctcgagaggggctgaatctgttgagagtgggagggtagaaaaaatgctgcagcttcttgtgggtaaacttcacacacaaacacccagtgtcccaagcactgtgcagtcaaacatcaaccctgctcagactttcctccttgggattgagaagcaatggattatagagaaagaaaggtggcttagcactccaaaacttggaagggtaattgaccaagaccccccaaagccaaagcagtgggcatccccactttctgtataccctataccaacacgtaatggctactagatacaggggcactagtacctgtctgcttggctacctccccttcttgcagaagtggtgaagggaatcactcaacctcaggaagggaaaatggctttctcatcttcaaattgaaagaggttggcagtgggtgaggagaataacaggtaaggatctctttcaatatacccatttgaagccaaaacctcagtttagacatacggtattttgaacctggtgactattcattgcccatgtttgtgaattatcagaaagcagaattcttgccaggcatagcggctcatccctgtaatcccagcactttgggaagccaaggtgggaggatcacttgagcccaggagtttgagaccagcctgggcaacatggtgagatcttgactctacaaaaaattcaaacattagctgggcatggtggcatgcacttgtggtcccagctactcaggaggctgaggtgggaggattacctgagcccaggaggttgaagctacagtaagcagtgtctgtgccactacgctcagcctgagcaacagagcaagaccctgtttcccacccctacccaccccctaaaaaagcaagctgaattcttgaactccctgcaaccaggtcacgcaaaccaaaggtaaaaggaacataaaaaagccttctggaaagtgtacagaaattcattgcagggtgatttttgtcttgtgaaatcatagttactgttattagcagctttttaaaatgttttatattcattttttatggtgttctgatgtatgagctgcttcaagtgcttttggacatagcttgggtataaaatgtaaaaagtggatattttcaatttgtagctttcttttttgaaacttattgaaatttgttctaaatataaccccttctttctcacccaccccaacacattttttaaaaaacaccaccaggtatccgttatagcactgatgtgagtgtagatgaagtaaaagctttggcttctctgatgacatacaagtgtgcagtggttggtaggtgatcgcttttcttgctacctaatgagaactctggggaaatatgtttacaaacatgttactgttaagatgctatagaaatataccttatcggaactgatttttttttaagttgtactctttaagacctgcatcatttctcaattactctaaattaagatatagcctttttttacgggagggatttttttacgggagggagctaattggattttaagtctagatctttgttttcaattcctcaacatattctataaataagaccaaattatagtagaaggagagtaaataagctattatctttttaaagtggtgaagagcactgattaaatatatattagagccccagcccccgccccagctgcgcgggcccccgcctggcccatggactgcacagccgagcgggcgccttgagcgcggtgcgggtcctcggagcacccccgaggtgagcgcaagcaaggtccggcatcatgtgctaggttattcccagtgcgaggccacacttgggccgtcggagcagcccctcctcacttcaggggtcaccctccccaagacccattgccccatcatggccggggaccggctccccaggaaggtgatggacgccaagaagctggccagcctgctgcggggcgggcctgggggggcctggtcatcgacagtcactccttcctggagtacaacagctggcatgtgctcagctccgtcaacatctgctgctccaagctggtgaagtggcggttgcagaagggcaaggtgaccattgtggagttcatccagccggccgcacgcagccaggtggaggccactgagccacaggacgtggtggtctatgaccagagcacgcggccgcagacagcttcctctccatcctgctgagcaagctggatggctgcttccacagcgtggccggctgcttccacagcatggccatcatcacggggggcttcgccaccttctcctcctgcttccccgacctctgcgagggcgagcctgctgccctgctacccatgagcctctcccagtcctgcctgctcgtgcccagcgtgggcctgaccctcatcctgcctcacctctacctgggctcgcaggaagacgtcctgaacaaggatctgatgacgcagaatggaataagctacgtcctctatgccagcaactcctgccccaagcctgacttcatctaccagagccacttcttgcgggtccccatcaacgacaactactgtgaaaagctgctgccctggctggacaagtccatcgagttcgtcgataaagccaagctgtccagctgccaagtcatcgtccaccgtctggccggcatctcctgctgtgccactatcgccatcgcctacatcatgaagaccatgggcatgtcctccgaagacgcctacaggtttgtgaaggaccagcgcccgtccatctcgcccaacttcaacttcctgggccagctgctggaggaccagagcagcccgaagctgctggccgccgtgcagggcgacgcgggcaccccctcaggaatgcaggagcctccccccagccctgcggccggggccccactgccatggctgccaccacctacctcagagaccgctgccaccaggagtgcggctgccagggagggcggcccgagcgcgggcaggaagcccccggcgccccccacggccaccagcacgctgcagcagggcctgcgcagcctgcgcctctcctcggaccacctgcaggacaccagccgcctcaagccctccttctctctggacatcaagtcggcctacgcccccagcaggcggcccggcggcccgggcccagcgaccccggcgaggccccgaagctctctgaaagctggacagccagtcggggccatgttgggcctgccctcgccctgcccggacgccgcgcccaggcacgcccacggcccggcgcgctaccccgcgcgcggcctgaacttcggctacgcggctgccgggccctggccagccggccagccccggagcctggacgccaccgctcgactccctgaagcgtcctcggtgcttcagccccgagggcgtgcaagggccgggcagggtgctgtttgcgcccttcggccgggcgggcgccccggaacccaacggctgcagcgacctgccacggcgggaggcagcaagggctgagcccgggacgcgcggaccagctggtcagacgagctggccccggattcgcacttcaagtgctgcagctgccagatggagttcgaggagggcatggtggaggggcgcgcgcgcggcgaggagctggccgccctgggcaagcaggggagcttctcgggcagcgtggaggtcatcgagatgtcctgacccctccgctgccctcggctccgccgcccgcagctgggcagttataaatatatattatatataatgcaaagaaaggcaaatggttttactgcgatttttatccagaagtaaatatttcgattttttatttatttaagctgttcattctggcactgatttggcaacagtgcgggtggtcctcgagctctatttttactgtctggtatttaaaccgaaacacacgtttctaagcaataagaggccaccttcagtcgcaagttgcaggccaggcctggggcccctccctgatcccccgccccaggaaacactgctgacatttgcagaggctgccgagctttcgtgaactttttacacaagagaaagttgaaaaaaaaaaaaaactttcttgccacaaactgagccgcagaaacccccttcttcccccacccaccgcccctgctctctcccttcgggctccgccccaaagccataggctgggggagcaggacctggtgtgccccagagaggtgcggccagccctccaccagctctaggcaccaaatcttggtggcagggagggcaccccgctgcccgttgccccagagctgttccctctcaggggaggacatgcattgggccccatggtgccagggcgttgagaggggctgaggaatagaacagtgtgtgtaggggcttggggcagggggttctggagggtcagatgaggcagagcccaggggaggatgggggtgttattaatgccccaactcctgccagagccccagtccagccactgagtgcctcagaaaggccattcccagagggctgcggccctcccttctcctttgcccctgcccccagagctacctgactggcagggcggcactactgcaggagaggagcttggcctccgggggtcaggcaggaggggggcctggctagcctgtgctggctccactgggcggggagccctggactgccaggtatgaggagggggtgggcttagggtcctgttccaggtccgtcccccacctagcaaggccccaggcaggacttggaaaccaggtgtgcacctgcaggctgaggggctccatgagcaggtgctgccttgcacagggagttcaggcgccagccaagcccctgtgcttctggggtaggcctgcttcacttagggagcgctgcctcaaggcagataaagcccccttgttgacccgacctgcatgggggcctctcaggagagaaactctcgtgcgcccctttcccagggcgccctctttctagacagcattccagcccccaaacacaggtggcttttgggcccagatgggtcagcctgctgctcctggcccataccctctcaggccgttgggactcctgcccttcagatgtcctagggtctaggagtgggccagtcaccctgggaagaggccaggggcttggcaggaggggcggcccaggcgggacccagtcctgagtcctggagcagggccagggaggcgcccgccccaccccagccagccgccttctctgctgtttcttctatttgttcttcttttcacccacagccctgtgttcctgtcatccctcctttcagcaaaagtcctgttcccgttccctctgtccccacccactcttgttccccaagaaaataagctatcattgttgcatttgcaatctatggattagaggtttaagtatttattattattggttaattattattatgttttatatatatatattagaacttggctagccaattttattgaacaattcctgttcaataaatgttgtttaaagtacagttgagaaaacgatggtaggtttatttcttgaactttcagaagttcaagcttaaagcatcacacgtttttctaatatcgtgtggcgctttctgtcattttacttttttaacctttatatggaatagcaaccatcaaccttctctttcagatgtgccgtttgggggtgctaaagctggtgttaagatctatcccaagaactataccgtaagtatgaaagtttttgtttttgtttttgtttttgcttttttgacacagagtcttgctctgtcgcccaggctggagtgcaacggtgcgatctcggctcactgcaacctccgcctcctgggttcaggcgattctccttgatccagtaactgggattacaggtgcatgccaccatgcctgactaatttttgtatttttagtagagaggggatttcaccatgttggccaggctggtcttgaactactgaccgcaggtgatctgcccaccttggcctcccagagtgctgggattacaggcatgagccaccgcacccggcctcaaagtgatatttgtgcacacagtgcatttatgaaggacttgaaattactgggcttctctgtatcccccatatcagtgaaatcaatagtccccattgcttttcaaatggaatgaaaaaagtaaagaattaactcattgagtgttttgccatataaaggtcacctacttaatatctatatcctttatcattttctgttttgtttggttttgtttttatgagtcttttttttttttttttttgctttttgtattattattttcttatttaaaaggtaattaatatcttcatattattagacacctatacccatatttaagaagtactgtgatctggctgggtgcggtggctcacgcctgtaatcccagcactttgggaggccaaggcaggcggatcacgaggtcaggagatcgagaccatcctggttaacacagtgaaaccccgtctctactaaaaatacgaaaaattagtccggcgtgttggtgggtgcctgtagtcccagctactcaggagactgaggcaggagaatggagtaaacccgggaggtggagtttgcagtgagccgagatcatgccactgcactccagcctgggtgacagagcgagactttgtctcaaaaaaaaaaaaaaaaagaatcactgtgatctaattagccaggcatagtgacgcacacctgtaatcccagctactcgggaggctcaggcatgagaactgcttgaacccaggaggcagaggttgcagtgagacgagatttcaccactgtattccagcctgggcaacagagcaagactctgtctcaaaaagaaagaagaaaagtagtactgtgatctgaagtttttaggtcaggatctcatgctagtgacaaatatcttaactaagccaataaaaaccttactttttatcctgtcagttccaagtaaattcaaactggttgtcacaatgctttacataatactaaattatctatatacaaacataaacagatatgatttttattctctttaaaattcaccatttagatggaatataattatattacagttaaccttaattaagatttggtatatttttcagtggggaattaatagaatgggaatttgagtcctggttctactatcttgtttttataacctacttttttgatcccttattttctcacctttaaaatggcattgcctaccttatgagttgttctaaggatgagaagacatgaaaatgtactataaatagaaaataagatgctagctataatctcaagcgatttttatatcttttttatttttattgttttcttattttacaggataacgaattggaaaagatcacaaggaggttcaccatggagctagcaaagaagggctttattggtatgtgtagccacatagattttggcataaagtgggaacatctaaaaaaatcttttttttttttttttttttttgttttgttttgttttgtttttgagacagagtcttactctgtctcccagactggagtgcagtggtgcaatctcctccacctcccgggttcaagcaattctcttgtctcagcctcccaagtagctgagactacaggcatgtgccaccacacccagctaattttcgtatttttagtagagatggggtttcgccatgttggtcaggctggtcttgaactcctgacctcgggtgatccacccatcccagactcccaaagagctgggattacaggcatgaaccactatgcccggcctcctactatttgtgataggagcttttgccaaacatacaacatttttgaagacactaatcttcgtttgcttgatgtcttcgtatcttactattatctgtgtttatatgttctttgtgtgtgatctgaacattcttttctatgatatgtaaatatttgtcatttaccttctaattttcaggcagtttaaacctttctatacatatatttttaatctagaaggcttctaatttgtttgaatagaatacacataattatttaataaaatgcttgccctatcagtatagttaatagaatgttaatagttaataatataatacttgccctatcagtatcagtatagttaaacaaaataaggtctacttaaataggaaataaagtgtatttttctctactttctttctcagcatttcccccaccatggacaaatgcctatgaaattaaactataaagtctgggcatggtggctggtgcttgtaatcccagcatttttggaggttttggaggctgaggtgggaggatcacttgagcccggaagttcaagaccaccctaggcaatatagcgagaccccgtctctacaaataatgaaaatgttatccaagcgtgatggtgcatggctgtggtcccaactactaagatgggaggatcccttaagcctgggaggttgaggctaccatgagctgtgatcatgccactgcactctggcctaagtgacaaaacaagaccacatctcaagaagaaagagaaaagaaataaagctattcagattcatttttaggaaaaaagtcatgaaataaatgtcatgaaataacctaatatagaaatacagtaagtataggtaactctaaaacttgactagatttggcctgtctttcataataaaaggcatttgggcctttgacgtgccgcatacccagcactactgtgaatttgtgcatcattacgaggagcctattaacatgagtgaactatctcactcacacttttataggagtacctaccgattctgagatatggtgaattgaagtcatgttcagcctgttaatagccttcataattttcaaaaggtctttcctcctcgcctaaatctcaaacacattttatagtcttgaatggtttcagactttattcagtcatatttatcgcccatatctgcaatatctccagctaaattttatcagtcttgacaagtacctaataattccaaaggtcaaaaagtgattcattggaatactgaaagaaaacacagcttaaactctagtaacttgatttatttgcctaattcgcaaaggcctcattgacccatgatgcagctaaattgacgtcttggcccagacagctttgaagcctaggaggcaggcaaagggagttttttctctcacttctcggcaaaccttcaaattcgatgctatttatctgttatttcctgacactccacagagagtgtcagattgaggctcagacctgagcctgagccctgatcctatcacatgtgtgtttagcatcagcttgtaaatttctacaaaacaaaacaaaacaaaaaaaaagaggctgggattttgataggaattgcattgaatctgcacaccaatttgtggagtattgccatcttccccaccctccccaaaagggttttgccctttcacccaggctggagtaccaggcagcagtcactgcaaccttgacctcctgggctcaagcaatcctctcacctcaccctcccaagtagctagaaccataggcgtgcgcaactgcacctggctaactttttaattttttgtagagacatggtctcatcacgtatcccagactggtctcgaactcctggaatcaagcaatcttcccacctcagcttcccaaaattctgggattatgggcatgagccactgcacctgaccagtattgccatctcaaccatattaagccttccaatgctgaatatgagatgtctttccatttatttaggtctctgatttctttcaatgatgttttgtagttctcattgtagaagtcttacaactaagtattgtattccttttaatgctattctaagtgacactgatctatcgttttcttatgatgtctttgtctagtctttgtatccagacaattctagcctcatggaatgagttgaggagtgttccttcctcttctgtttttggaaaagcttttgaaaggtcggtgttcattcccttgtgtgagtgtaaatatcacctatgtaaagttctgcaggaccctgatgtctccacccttctcatcctcttatatctctgtgcaccaaaattaccctttcatctcctactctatagtcacatgctgttagaaaagttgcttttttaaaaaagatgaacttctgcctcagaccgtgctctctatataagaatttacctgttaggccagtcgcggtagctcatgcctgtaatcctagcactttgggaggccgaggcaggcaaatcacctaaagtcaggagttcgagaccagcctggccaacatggtgaaaccccgtctccactaaaaatagaaaaaagtagccaggcgtggtggcgggcacctgtaatcccagctactcaggaggctaagggaggagaattgcttgaacctggaaggcagaggttgcagtgagctgacgtcatgccgttgtactccagcctgggcaacaagagtgaaactccgtctcaaaaaaataaaaattaaaaaaaaaagaagaacgtatctgttattcaggagctacttgtaatctgtgcatcccaatacattagttttgtatggagcagaaaactagtaagcctaataattgataccttgtgattttgttttgggtgggtgaagctgtttcatgtttaacatgtatagactgtttttgagaaggattttatcattatatgtttgtgatttacaaactgtgtgcttcagacttgccacttgccagagcccttctccaattggaattgttttttgtttttgagacagtctcactctgtcgccaggctggtgcaccgtggcgtgatctcagctcactgcaacatctgcctctgaggttcaagcaattctcctgcctcagcctcccgaatagctggcactacaggcgcgtgccatcacgcccagctaatttttgtatttttagtctacaacagggtttcaccacgttggccaggatggtctcgatctcttgacctcgttatccacccaccttggcctcccaaagtgctgagattacaggcgtgagccaccgtgcccagccagcttttttgtttttaaaatatattgtttaatcaagatgggatctcactatgttgcccaggcttgtatcaaattcctgggctcgagccatcctcctgcctcagcctcccaaagtgctgggattacaggtgtaagccactgccccagcctagttggaattgttgtttgaggtaacaagcttacttaatcctaaagcaagcataatactttcgtagatgcctctagaaagattcgggaccaatttgtcatttgtacattgggagaaaaggagtggttaaacaaagttttactgacctccagcagaggtatgtcactaaaggaatggaaagtgagcaaacaggagctggagagcaccagagagcccttttgtcagtggatgaggctagaatatggcattaatccttccaagtgctgtgtggggttagacttctcatgaaggataggtttgggtaggttagacttcatgagatttttttctgtttttaagttttttgttgtccttgttgacttcatgagatttttaaggtgactaagggaagggtgctaagacatagagttacagattaggtgggaggtggagagggttggggtataaaaagcagtccttgaacatttcaaagttgtcttataccagccctgtatccaatatatcacatcttgttcaaagaagttgattatctaggccttgggcccctgagttaaagaaaaacattacagtatactgattccgtcgactaaaaagtaaaatttataggaagaattgagtacagtccttagaaagaactttaattattttatggggggacataatggtttaatagtttaacctcttttttttttttttttttttttttgagagacagagtctcgctttgtcgcccagactggagtgcactggcgcaatctcggctcactgcaacctccgcctccagggttcaagtgattctcctgcctcagcctcccgagtagctgggattacaggcacttgctatcatgcctggttaatttttgtatttttagtagagacggggtttcaccatttggtcaggctggtctcgaactcctgaccttgtgatccactctcagcctcctaaagtgctgggattacaggtgtgagccacaacatccagcctaatagtttaaccatttttaaagttgtgtttttctttttgtaaagatgagtttctattatacagttgaaataatatagaaagttataaacaatatatatatggtggggagaaagaatggggaagagaaagaaaattgtaagtgggaacatgttatacatgttgtatgaaacctgcctttttccatatgtatgtttgtgataattccaagtaatttacatgcatatgttatcctttttaatggctgtttagtactttgcataggtataccatagttcatttaattgacatacaagataattagattgtttttatttttactatgtttgagaggagtatttctgcacctttacggatttgagtgagcatcacttaacatgtttttatcagagatcttactgtagcagtcagtagtagtgcagtcagtgatttctgctatggcctgtaagctaatttgttagcctaacacttcaatttgctatgatctgaggaactgaaagctaaggcctaaaattttatatgtgctaagtgtcgaataataggtcaaagctgcattcttccacaagtaaagataatatggggcttaacacaattgctttagcaatgtgattttctcccctttttctctacttggtaaggagggcttatacccccactaagcaggcacatgcctgtaatcccagctactgaggaggctgaggcaggagaatcgcttgaacctgagaggcagaggttgcattgagctgagattgtgccattgcactccagcctgggcaacaagagtgaaactcaaaaaaaaaaaaaaaaagaaagaaagaaagcaagcaagaaagaaagaaggaaggaaggaaagaaagagagagaaagaaagaaaagtaaatctgtggatattgtacaaaagattgttttatgattttttaatttttttaacataacttttattgacttgtatttgtatttttatcaaacatacttcatttgtttatttatttattttgagatgaaatctcactctgtcacccaggctggagtgcagtggtgggatcttggctcactgcaacccctgccttccaggttcaagcaattctcctgcctcagcctcccacgtaactgggattacaggcatgagctaccatgcccaactaatttttttattattagtagagatggagtttcaccatgttggccaggctggtctcaaactcctgacctcaggtgatccacctgcctcagcctcccaaagtgttagtattataggcatgagccaccgcacccagcctcaaacatactttagacaatttttcacctcagcactattgacattttaggctatgtaattctttgttatgggggctctctctgccttgtaggatgtttagtaatatccctggcctctacatattagatgtcaggaagacccctcagttataacaatgacaaatatattcagattgccaaatgtcccctgtggagcaaattcatcccttgttgtgaactgtgatccagagagccaaatagtgatacaaggtttattgttcacaatagctcgtcccctccaatccagacatctgcctcaccatattccactccccagaggcaaccactttcaacaatcttaaatgtttcatttttattctatttaaagcctttgctcatttttaaattgggttttgtccacattattgagtggtaagagttctttatatactccacagccagttgtggtagtataggcctatggtcccagctactcagaaggctgaggcaggaggataacttgagcccagaaggtcaacactagtctaggcaacatagcatgaccctgtctctaaatgagtctttgaagtatatatattctaggtaattgacctttatcatgtatataatttgtaaatatttcctctcaatctattagttgtcattgcactttcttgatagtctcctttttaatcttgagaaagcataatttatttttcctctggttggtgtgctttaggttgtatgtaagaaaccattgcctaatccatagtcatgcagatacatccctatcttttttttttttttttttttgagatggtctcgctctgtcgtccagattggagtgcagtggtgtgatctcatggctcattgataactgcagcctctacctcctaggctcaagcaatcctcccccttcagcctcccaagtagctgggactatagcaccagctatagtcagcctcccaggtagctgggaatatggcaccaggactatagcacataccaccactaagcacagctaatttctgtattttttggagagacaaggtctcaccatgttgcccaggccagtcttgaactcccaggctcaaacaatcctcccacctcagcctcccaaagtgcaggattacaggtgtgagccactgtgcctggcctagagaggtttttttaagaaatagtgaccaaaaatatcccacatttgatgggaattgtgaatctacacattgaagatgctcaacaaattcaaagcaggataaactcaaagagatccacactgacacacattataatcaaattgtagaaagctaaagacagaaaagcagcaagagataagtgattcatcctgtacaagggatcttcagtaagactaacagttgcttatcagaaatcacggagtatagaaggcagtggtggtgtgctgggcatggtggcatgtacctgtagtcccagctgactgaggctgagacaggagaattgcttgagcctgggaggtggaagttgcagtgagctgagatggcgccattgcactcccgcctgggcgacagagcaagactccatctcaaaaaaaaaaaaaaaaacagggttggggaagctcagcatggtggctcatgcctgtaacttcagcacttttggagactgaagtgggatcacctgaggccaggagtccacaaccagcctgggcgacataaggagaccccatctctacaaaataaaaataattagccagacaaggtggctctggcctgtggtcctagctactcaggaggctgagacaggaggattgcttgcagccagcagtttaagactagcctggacaacatagtgagaccccgtctctacaaaatataaattaaaaaaattagctgggcatggtggtgtgcatctgtagttccaactactcatgaggctgagacaggaggatcgtttgagaccagaagttggaggttacagtgaggtatgatcataccactgcactccagcctggttgacagagcaagaacctgtcactaaaaaaataataaatgaataaaaatataagaatgcttggcctggtctgggcgtggtggctcacgcctgtaatcccagcactttgggaggccgaggcgggtggatcacctgaggtcgggagtttgagaccagcctggccaacatggagaaaccctgtctctactaaaaaaatacaaaattagccaggcatggtggcacatgcctgtaatcccagctactcgggaggctgaggcaggagaattgcttgaacctgggaggcagaggttgcagtaagccgaggtcacacccgattgcactccagcctgggcaaaaagagggaaactccacctcaaaaaaaaaaaaaaaaaaaaaagaatgcttggctgggcacagtggctcatgcctgtaatccctgcactttgggaggccgaggcaggtggatcacctgaggtcaggagttcgagaccagcctggccaatatggtgaaaccccatctctactaaaaatacaaaaattagctgtgtgtgatggcacgtgcctgtaattccagctacttgggaggctcaggcaggagaatcacttgaacccagaaggcagaggttgcagtgagcagagattgcgccactgcactgcagcctgggcaacagagcaagactcgggctaaaaaaaaaagctgaagtgagtccttcaggctaaaatgaaaagatacaagataataactcagagctatatgaaaaaataaaaatcactggtaaaggcaactatatagctaaatataaaagctagtattattgtattttgggtatgttattcctctttctcctttatgatttaaaaacatgcatgaaataatatgcatctatgttaataggaactaattgtttaaagacataatttgtaacaatatagctaggggacagagaaaggagcagagttaatgtatgctattgaagctgagttggtatcagtctgaactagacttagaactcagcatgttaactgaaatcttcatagtatccactaaaaacaaaactttaaaaatatacagaaaaggaactaagaaaggatcaaaatattacaggataaatcattaaccaaacacaaaagaaggtactgaggagcaaaacactttatgtagaaactaaacagcaggatgacataagtaagttctttggtgtgtgggtttttctgtttttcttttttggggtttctttgagacagagtcttgctctgtaactcaggctggagtgcagtgtttcattctcagctcactgcagcctttgcctcccaggttcaagtgattctcagcctcctgagtagctgggattgcaggcgcccaccaccagacccagctaattttttgtatttttagtagagatgaggtttcactacattggccaggctagtctcgagctcctggcctctagtgatccacccgcctcggcctcccaaagtgctgggtacagccatgagccactgcatccagcctgtttttggttttttttgagacagggtctggctctgttgcccaggctggagtgcagtggcacaatcacggctcactacaaccttgacctctgcaggctcagctgatcctcccacctcagcctcctgagtagctggaactacaggtgtgcaccaccatgcccagcttatttttctattttttgtagagacaggagtcttgctatgtcgcccagcctggtctcaaactcctgggctcaagcaatctgcccacctcagcatcccaaagtgataggattacaggcgtgagtccaaccataagtaagtttctgttttttgtttttgagtcaatctcactctgtcccccaggctgaagagcagtggtgcgatcatggctcactgcagcctcacctccaggcgggagccaccgtgcccggtcaagtaacttttctgtttcagtaatcactttcaatgtaaataatctcatcaatggaaagatcggcagaatcaatttttttaataatgtaatacataatccaaatatgcaactcacaaaatactcactgtagacccaaagacacaaatttgttgaaactgaaaagatggaaagagataatccatgcaaatagtaaccaaaagagagccagggtggctatactaataataccacacaaaatagattttaagccaaaaactgttacagaaaaacattttatgttcgtaagagagtcaaatcacaagaagatgtaacaattataaacacatatgaaccaaaaaaaaaagggctccaaaatgcacaaagcaaactaataaaattgaaggaagaaacaattttacaataatggagacctcaatgcagtggctctatcacagctcaccgcaatctctgcctcccagactcaagcaattctccagcctcagcctccccagtagctggaactataggcacacagcaccacacccagccaatttgtgtatttttttgtggagacggggtctcaccatgttgcccaggctggtctcaaatgcccaagctcaagcaattcacccacctcagcctcccaaagtgctgggattacaggcctgacctactgcgcccagtcaacaccccaccttcaacagtaaatagaacatctagacaaaatcaataaggaactagaggaattgaacaacacactaaaccaactagacctaacagacatatagaaagctctccatctaacaagtgcagaatatatattcctctcaagtgcatatggaacattccccatgataaatcatatgttaggtcacaaaacaattctcaatacattttaaaaggtcaaaattatatgaagggccacatgtgttggctcacagctgtaatcccagcacttagtgaggctgagacaggcggatcacttgaccccagaagttcaagaccaggctgggcaacatggtaaaaccctgtctctacgaaaaaaaaattttaaaattagctgggtgtagtggtggtgaatacctgtagccccagctactcaggaggctgaggcaggaggatggcttcagcttgggaggcagaggctgcagtgacccgagatcataccactacactccagcctgcaggacagagcaggacctgtctcaaaaaacaaaacaaaacaaaaaaaacaaaaacaaaacaaacaaaaaaaaacaggccaggcttggtggctcatgcctgtaatcccagcattttaggaggccgacgcaggtggatgacctgtggtcaggagctcaagaccagcctgaccaacgtggcaaaaccccatctctactaaaaatacaaaaaattagctggaaggggaggcaggcacctgtaaccccagctacttgggaggctgagccaggataatctcttgaatctgggagacagaggtttcagtgaggcgagatcacgccgctgcactcaaccttgagcaacagagtgaggctctgtctcaaaacaaacaaacaaaaaaattatacaaaaaaaaaaagtgaactgcatgttgctgcacagtctaccatagcacaaatgtcaattgcttcttggctttcctggggtgatgggaggtctgaacctaacacagtctcacctgatccttcacaggagtcacgtagcctttctctctccagtccacagatgtggggatctcaagaagcaggcgttcctggaactgtttcccgttcctgtgcttctggtattgaaaaccattcatcacctgcctgaattcttcagtggtcttcaaagaaaagtaaataaaatgttaagaagcaagagattaatttggtaaagaactgaggaggggaagcacagagctgggcagcccacagcatacttaccatgtctccaaaggtgttcatggccattgtgaagctgtgtttcccttggctgtattcctgattgtgctgctcagtcatcttcatgttctctcacactgctctcctccatccttcttcattctaaaggcaaacatgtaactgatgttcttcatttctttttttttttgagacggagtctcgctctgtcacccaggctggagtgcagtggcacgatctcagctcactgcaagctctgcctcctgggttcatgccattctcctgccccagtctcccgagtagctggaactacaggcgcctgccaccatgctaactttttgtattttttttttagtagagacggggtttcaccgtgttagccaggatggtctcaatctcctgactttgtgatccgcctgccttggcctcccaaagtgctggtattacaggcgtgagccaccgtgccccgccaatgctatttatttctaattaaaacccaacatatgctaaccaagtgaatcttcagacagagatgtaagagtaaccatggccagggaaggcttgacacttctaggagatgttttccaagctgagacacaacaagggtgtatgcccatatcgtgctcataatcagtgctattaagttattgtgttagcttattggtaggagccagcctctagaagccactctctggccatatgatcccaatagcaatgcccatctctctggtgttcccctggacagtttcagatgccaccaaccatgtcatataatctcttgtgctttgccttccacttggtccattgtgcgtctagactgtggtcacgtgttagagcagctgaggcaattcccaggaaaaaggcagccaggaggagtgaaggattcatgtttcaaaaatctaggaagggaaaagaaatgaggatctgattagaccgatcctaaaaagccattttactaccccctgagaaactagggccaccatggtagaataaaaatatttaaattattcttccaagcatttacctaaggactgtggaagaggccaaggatgtggctggagaaaaacagggcaagtggaggtattggagggacccaccaaaatgaaaagcagcctgtccagagctgtaggagttgaaacagttttctgggatgatgatgacaggctatgaaaaggacaggaaggtacctgatgggcgagaagcttaaggcaacaaccgggaaactaggaaaccgttggcccaggttttgtaccaattgtgctgaggtcatccaggcaaaacctcaagaatgaagacatctaatttcaagaagggacaaagggatccccaataattgggaagtcacatcacaccttgttcttggctaatacacaacagaaggtgaagtatgttttccaaatgccccttgtaatgaaacagttattgaatgtcttcccaggacaaactgggaaggagagcacccatctaccgccgttcccgcagtcctgcagtcctgcaggtgggccagtcctgccaacactccagctcccctcacagagcataaactgaatcaggtggccgaaccaccggaagccagagtccccagtgtccgcgcccacacaggggtgggtaggcagcttcccaggctttgggctggggacccaggccaggtcccctggctcttgctcccgccctccgctcatgctcactgtggccccaggacgtgggcgatgttgcagggagcaaggggcgcctctgcctgatttgccggggtcgagcctccctgtcccacccccaccggccctgggaatactgcggcctggcactccggaaaatccctcactcacagagctgaaggacttgctgggtccctggtggcccctgtccaatcttagcccactggggtctcagctgctgtagccacaggtggacaggcacagtgggcaggtgctgggtccaggagtctcctgtcgcctaaggccgcccgaaagcagctaattgacctctaaagcccctagacccccctgcccccttgccgcccaggcaggcccgcccccaccacttgcccgctctgcgattggctgcgccagccgctgggcggggccttccggcgtgctgactcctggcatgtggagcagctcagtccccttgcctcagtggaaccgggggaggggagctgggggctacgaagagaagggtcggaggtctccctggagggttcggatcaactaagtaccctatttaatgccctgggcgggtggtttatgaaaagaaatttacaggagccctgtgtgcattttcagcttaaccctgcttttcccttaggcctagaatttttgattaaaatctcctgcagggcagagagccagaggactgtaatccagtggttcctgtttagtccacagcaaaggtgcggctggctggaagaacgcacagcctgcaagcagaagccttatctcccaattaagggtgtagaagaatctgggcgtgttgctggtgtctcatgcctgtaatcccagcactttgggaggctgaggcaggcagatcccttgagcccagtagttcgagaacagcgtgggcaccctggcgaaaccccttctctactaaaaatacaaaaattagccgagtgtggtggcccgcgcctgtggtcccagctagtcgggaggctgaggcaccagcatcgcccagcccggaaggttgaagctatagtgagccgagatcgcaccactgcactccagcctgggcgagaggagaccctgtctcaaagacaaaaaaacaactggtaggaaaacgcaccctcaaaacacatgatgagatggtcgagaccagaccctaggagggtgggtactggctgggtgggtatccagagaccatgggcgtttcataatgcattgtttcccgtctcctccactcagcgactcttcttcccctgaagtcttgcattaagtaagtgaatgaatcaatcatcaagttaatgaagctctgactttgtacttgttgtcctttgcttggtacagttgggcactgccttagaaacaatctccaggtaattttcccaactgcttttgtgaggcccagttttccattttaaaatctaagattacctcagtaatcttgcttttacagcaaatgggcatggagcctgacagatatatttaaactaagttatggacaagctgcctggtgcattaggtagcataggagctaaccttgtgggacatctccccatattcgtaatattcacccctacatctataatcaataaatgcttgtttggaggccatagaaactcttcctgagatctgacctgtgtcttctgctatctgcctgatttctccccatagaacaggaaaacactgtgtaggagatattgtgaatagaaatatgaatataggccgggagtggtggctcacacctgtaatcccagcactttgggaggccaaggcgggtggatcacctgaggtcaggagtttgagaccagcctggccaacatggcgaaaccccgtctctactaaaaatacaaaaattagccacgcatggtggcaggcgcctgtaatcctagatactcaggaggctgaggtaggagaattgcttgaacccagggaggcagaagttgcagtgagtgagatggcaccactgcactccagcctgggcaacagagtgagactctgtctcaaaaaaaataaaataaattacaaaaattagccaggcatggtggtgggcacctgtaatcccagctactcaggagcctgaggcagggacaacggctcaaacctgggaggcagaggttgcagtgaaccgagattgcaccactgcactccagcctgagagacatagcgagactccatctcaaaaaaaaaaaaaaaaaaaaaaaaaagaatataaataggaaatacagtgattcaaataagcaattgttagttcctcagatcagaactgtgagttctatactagactcttacatgttatttcttctggtatcttagcaatgattctgaataaagatcagactccttagtcggcaggtgggacagttctcaataacagaagctgggttctcaggggatcccgtggatatgaggatgaaggttagaagcacttgggaccatacctgcaggtctgatttgaggacaatgagaccaagacaggaaggcagcacctgctgaggggctgggggtgggagaagggaggaaacgggacacaagaaaataagtataaaccaccagactgcagtcagtgatcaacaaaattcccaagtttatattgagaagatttccctggtttggggttttgaagagattatataagggattcgggttgcttgatttttttcattctttttcttttaacttggtctcaatttttttgtaaaaaaaaaaaaaaagaatgtcttatgtgcacctttagaactggtgaatgaatgaacctccctttttaaataactgagattgtcactgaagcactgtcatccgatttaggcttaaaaatctgacactgaatttatcctagatgataaagtgcaagtctcttgtctcctagaaatgatcaggcaaggaaacacccaggaggcccagggcaaaatgccctcctggaagctggtggggtaggaagatgctgaggcccagtatggtccctggagcatgcattctgtgtggtgacagaaattgtttgcttgaccgtacattggtcaggcttctgaaccttctgctaaacccatctgtgcactttttgtaaaattcagttttaggaaattaccctgctaagtcagtttagctggcaggaatccccgtccaccatatactgatcagggtcctcatcccccaccatcccgcagctgatgtcagataaccttggcctgtgctcagcgagaatctcgttaggtcagtttagccagaatcctcccttacccttcatgttccctcatagtcatttcctatctgctaacccccatcctcctccttgagtataattaccacttccttgtgctggattcagagttgagcacaattgctctctctcactgtaagaactacttgcagtgctcctagacctacatatgtgaacctgtttctttaacagtgactcacctgtctttttctcctttcaacttgacactagctgaggcttatccgcatcaaagtggagggactggccccgggggatcctcagggcttcaccttgatggcctgcaggctcacattccactttttctggtgccttctggctccgagtccagtttgccacacaagtgatggaggttggaaggagggatgaggtgacagaggtgaaggagggtaaattcttttctaagccctacttgcctgacatgcatttaggtttttagaaaggaacctgaccccaccctttattttctatctcccacttccatgactagccttacctgtaaaaatggggcatagaagagcccccatctcctagggcagtgtttttgagcagggggtcactgaacagtagcaccttcatctcttgagaccttgttaggaaattctggacttggggtggttgatcatgcctgtaattccagcactttgggaggccgaggctggcagaacatgaggtcaagagatcaagaccatcctggtcaacatggtgaaatcccgtctctactaaaaatacaaaaattagctgggcacggtggtgtgtgcctgtagtcccagctaatggggggctgaggcaggggaatcacttgaacctgggaggcagaggttgcagtgaaccaagatcatgccattgcactccaacctgggtgacagaggaagactctgtctcaaaaaaaaaaaaaaataaaaattcctggaaatggattagcttgctgacaagagttattccattgtgtgtttctacctgcaatacctgaggatgcccattttctcacgatttataaactaactcattttatagatgtaattttcatacatttgggggtatcgttctaacttcattattattacttcaaggtgttattatttccccatcatcatcatggtcattatcataactagttggtgctgacagtagtcaccctgcattgagaactcatactccaggccctttccacatagacttgatttaattccattcactcctcacaacaatcgtctgaaagaaagaatcactaagccattgtataattgaaacacaagaggcgagtgacttgtgtgcccttgggcaggtaatttaaacactctgtgcccccaagttccaatagataaatgtaaataataatatctttcttacctaatacatggggtcaacagttaaagtactgtacatttgtgaggtatttcatggcacctgtgaattgctcatgtgatgacttagtgtgcttccagtgtcagtgtgctgggaaggagacagaataagaagaagactgaaaagatgccgagtctagtgcagggtatcctggggaaaacacctcctgtttgtccaacagcgattggccacacattgaagacacactacctggctgtgaactggggtgaccctgttgaaatcttgtggaaagcttgagatgctccttagagggtgtttatccctcgagctggcacaaatgcggtttgttgttcagtttttccttctactctgcctctatctggtacaaaatggaattgaagaggatataaaccagcaaggaacaatctgaaatcagaatggtgacaatgggagaaagtaatcttggttcaacccaatgttcacctgaagtctctttattaaagactactaacaggaacgaaattgcataataatcttcctatgataatttcaagttccagaatttctctatggaactttcaaatttcacctctgttaactcatggaattttccctagaatctgcaaattaccgaagtctttggaggtttgatgatcactcactggtcagcggtactacaaaaggattctggggagtttgactcagtggtcagcaaaggctcttccgaatcttcagtctgattctgagattccccggggagaactggagcctttcttaacagctgttgattggaaagaccacctgcttcatcctctattgcaacagaaatagccattgtgaatctccatggggaggcacaatgagttttttctagcatgtgtgactcaggtcattttgttccgtggtttccagttgtggggacttggcaaggtcacaccctcccctgagcctcagtttcatcgctcagaaaatgaggataacaattctacttgcctcataggattgttgtgaagattaaatgagacatgtaaacatttgcttatagtaatttcacaccactttattgtggaatcaaagacagaattcttacagaggtcttggttagttaagaaaacatccattcaaagatttgattcacaggacaccctcactgtctttctctctctttttttttttttttttttttttgagacagggtctcacttcattgcccaggctggaatgcagtggtgtgatctcagctcactgcaacctctgcctcccaggctcaagagattctcccacctcagcctccgagtagctgggattacagccatgcactgccactcctggttaatttttgtatattttgtagagacggggttttgtcatggtgcccaggttggtcttgaactcctgggctcaagcaatccacccgcctcagccacccaaagtactgggattacaggcgtgagtcaccacacctggcccttgcttactttcgtacttcccaagaggcaggttaccaaattggtgaaattaaccataacatcattgtgatgggcaagcagatatattaaaagcaaagatacagcaggttaacattaaattttgctcatcccaggacaaacctggccacaggaggcctttgccagtattctgaaaagtgttgtgaccatctcctttaaagctcagttaaaggtttctggctggactccaggctgcttcaagctctttacttgtctttatcattctttaaggagggacccagacacagtatgcagaggcctgaatcctctagatcattctctctccaccatgagtcctgccgtggggacttttccagctccctttggccttatgagccagaaaatcaggctagagcctaaagagaatagaaatttcagaatcaggcttgttctgcgactgtatgggggagctgaaggacacaatgggctttctatattggagactacccatcatactctctctgcccagggagaaaggacagatgctgtgtgattttgtagtctgtgatttggcttctcattctcgctgctctctacacctcattgtttacttcactcccctgaaaaaaatgctccctaacaggctcagtacccaacttctgggtattgctgcccacatttgccttggttctaccttttcagattgcaggatcctgaggttttgcttggagcagctcagattctccactagatctaagatctcacctagtcctgaggatttccttaaagggaaggggaaagatagatagatgatagatagatagatagatagatagatagatagatagatagttgctgcctttgctctacagcatctgcttggtgaagaggctcaggatctggatcctggcctctcagctttcaggaaccccattcccccctgacaggggtggcaagttcatcctattattcattaagaaatttgaaaacaatcattcaggaattttaggtcaagagctggaaaaccccaagcctccgtcacctgagcaaagggagatactgtgagcacctgcaggatacacccatgttccaccacctgcctgaagaagcctgtggttcttgtcagcttctcaagggtgaagtgccaatccttttctgcttgagcagaagagcagaccaaagagctcattgactcaaggagcatcacggcaactgagctgcacctggaagagaagaatccagggtgtgatccacagccaaggcctgaagcaatggggcccatacttggcctctccagggtgagttgtgacccaagtgctgggctttagcccatgagtggtccctcttgccatttccagtttcctcccaaagagaggccagtgttggtgatttcatttcttataatctccttaggagcacaggttttggtttgtgccttttttggatcaggttccctgcattgcagctgctataattaaaactattaacaacaacacagcaccacagaagcaagttagttgctaatggaatttgctgataatgctgtcttctagagaccactctagtaactggagagccttggtgtagagctgatgataaaacctattcctgcttttgtcagtcatgaggagcatttcctttctagacagaggaactgaaacccacatgccagcccaaatttaccaaaagcagtcactggaatactcatcacaccatcatgtctcatcttatccctttcgttaccttcaaatacggccccatttcctcaggaccagaactcccttatgtgggcagcaggactaaggcccttgagttacctgtggtgactcctcattaaatggaggaatgtgccagtattttcagcaaaacatgaatctgatgaaacactgactgaactgtctcctagtttcaaaacaaattattaccactcagggcctctatttagggcaatcagagtcagaagtgggaacgcatcttgtcctcctaccttgattaacagtaactctaattgcaggatgatggtcaaatcctctctcctctaatgtgcagttgtgaaggatttaggctccactgctcatgcatttgggtggggcctgaatcactttcagtctagcacaggcgggtcacttcaggccttcccacctccatcagcatccttcaatcctcccctgacatctctcatttatgcttcctattgattcagaggtcccaacccaagtggctaaaagaaacattcattaacctttctacaaagtcatgaataatccatggattacattgaattcatccctactaaaaccatcttcagaaattcagatgtagtaaccttctttctgaatttttttttttttttttttttttttttgagatggagtcttgctctgtcgcccaggctggagtgcagtggcatgatctcagctcactgcaagctccacctcccgggttcacgacattctcctgcctcagcctcccaagtagctgggactacaggcacccgccaccaggcccggctaattttttgtattttgtttactagagacggggtttcactgtgttagccaggatgatctcgatctcctgacctcatgatccgcccacctcggcctcccaaagtgctgggattacaggcataagctaccgtgcccagccaagtattctatccttaatgaacacatatatgcacattatatctattttttataatatatatatttagaattgaatgtcagagtacatatcagtgttggaggaagagaataaggaggaagcacagaaagtaaaaaggaaaaataggcaccaaaaaagatttggagaatggcagatggccaaggagatgcagttgggaagtgcctcttccatggagaggaacccaaatatctagtaaaccttcacattttaaacagatcttttgagagaaaacactgaaagttgacacagaggtgacacagacaccatggttgaagagggaagaaatgggacagtctgctcagagtcactagacatcaggactggcccatataccctgaacaaacccaaggaaggggtgagtgaaggaaccctgggacactacatacccataatgtacctctgagatcctagttacaggagtttctacgaccctcatagatctttggactggtaggagagctgcctcgagcacatgcagaggcacagtttgaacccacacagagcccagaaggctttgttgtgctgtgcagctgcagcaaaatgcaaccctaggtgcccatcccacaagcctccatttcatactgagtggctaagttcctgctgtccgccaggctgggagtgaaccgcgcctggcctgctcacatgcccaagataggccccatcaccagtgctgtgtgattaagttgcatctggtccacatgcccccttgcctgtcaaccccttcccagagctcatgcctggtcacgcctgcaagagggtgtccacagcacagcatccactgcatagcttgagtgttttgttgacagcctgggaaaagctcaccaccctgtccccaagtcacagccagtgcttgaagcttagaggccagaggacaaatccgtgagcccagtcccaactccccaagactcaagtataccacccagggacactgagctgagatttgtaacctaatctcaagtgaaggaggatcctccatagtcagaatgcagagaagggtgtggtatgggttctcatgggggcatgggagctggacacccctccctttgcaagaccagaccatgaagggtatggcctgatggtggtagcttctttcccagggagtgtcctggcacagaatgcctggagcagctcaacaatgtgggagcagatggcttggggaaagcctagttggttgggcttgccgccagggcgagtgtctgtgggagatctgctgggtcaggggagtgtaagctaggcagactccatggttgcctgctgggctgaaaatcatgggctgcagactccatactggtgttgcacccattgtgccactgccctgcctggagatcctctacccttgaaatactgcatcatcagagcaactgcagacataccctaaaacctgctctgactttggtaagcacagtggactggtgggtctctggagagctgtgtgtccctagagatgtaatcctcagtgtggaccatccctaagggaagggggagtgcagcctgccaaagcaccacatgagacaaagaaaatgtggccatggcataagccactgaaaggagcaccaccaaggcccagaaccagacttggagaaggaattatgtctcgcctccatctcccctccccagtgcactgttgcagatgcaacaatagctcttcccataggggcccagaaagcgtgcactgaaagaagttgtttctcatgattctccagtgagggcaagcatgcaccaagaccccacctgccagctcttactcttaagtccatctaccagactgaagtttgagttataccatcatataaaaatacattgctaaaacaagcaacatctgtgaaagccactgcagcaacctatctgtaaccaaggaacatatatggaaacttcaccctctgcaactacagagaaatgaagccaatcaatcacatacaccactgtcatactttcaaagagaataaaaaatataaaagccctgtgatggttaatactgagtgtcaacttgattgtattaaagggtgcaaaatattgttcccgggtgtgtttggagggtgttgccaaaggagattaacatttgagtctggactaggagaggcagaaccaccctcaatctgggtgggcaccatctaatcagctgccagcacggctaggacaaagcaggcaggagaaggcagaagagcagacttgctgagtctcctggctttcatctttatcctgtgctggatgcttccagttcttcagcttttggactcttggacttacaccagtggtttgccaggggctctcaggccttcagccacagactgaaggctgcactgtcagcttccctacttttgaggttttgggactcggactggcttccctgctcctcagcttgcagatggtttattgtgggactttaccttgtgatcgtgtgagtcaatgatccttaataaactccccttcaaatgtacatctatcctattacttcggtacctatagagaactctgactaatacaaaccccatctaaatgaagcaaattcaaaaaagaagtgtcaactcccgcagatggaaaggaataagcacaagaagtctggcaatacacaaagccagagtgttttgtgatctccaaagcctctcactagctccctaggaaaggatcctgaccagatgtaaatgtctgaaatgagacacatagaactcagaagatggatgtcaaggaaagtcaatgagacataagacaaaatagaaatccaatgcaaagaaaccagaaaaacagtccaagatttgaaagacaacatagttatattaagaaagagccaaactgaacttctggaactgaaaaattcactaaataaatttcaaaatatagttgggagacttaaaaacagactaggccaagcagaaggaaacacttcaaagcttgaagactgattcttcaaattaacccagtcatgcaaaaataaagaaaaaatattttttaaaaagacaaagccttcaagaaatatgggattatgtaaagaaaccacttctacaacttattggtattcctgagagaaaagaaagagtaaccaacttggaaaacatatctgaggaaaaaattcaagaaaatattctcaattttgctagagatgttgacatgcatacaccagaaatccagagaacctctgttatacactataaagacagccatccccaagacacatagtcgttagactatccaaggttaacacaaaagaaaaaacaaatctcagacacagctagagaaaagagcaacactacctacaaagggaacccatcagactaacagtggacttctcagaagaaaccttacaatccagcagagattagaggtctatttttagtactctaaaaggaatgacattccagcataaacattcatattcttcaaaactaagcttcataaacgaaggagagattgagtctttctgagtcaagcaatcggtaagggaatttatcaccactagactagccctgcagaaatgcttaagggagttctaaatgtggacatgaaagaacaatacacagaaaaagcacagttaagtacatagtccacagactctataaagcaactacacaattgagactgcaaagaaactagctaacaaaactatgacaggaacacaatctcacatatcaatgttaaccttgaacataaatggcctaaatcctccgcttaaaagacatacagtggcgaattggaataaaaaaatcagaatcacccatctgctgtcttcaagagacccatctcacaactaatgacactcatgggttcaaagtaaagggatagagaaagattaatcatgcaaatggaaaacataaaagagcaggagtttctattctcatatcagagaaaacagatcttcagccaaaaacagaaacaaggacaaaaaaatgttattgcttaatgacaaagggctcaattcaataagaataattaactatcttaaataaatatgcacccaatattaattggagcatcacgatacataaagaaatcactactagacctaagaggtagacagcccctcagtaataactgggaacttcaacactccactgacagtggtagatagattattgaggcagaaatctaaacaaataaattctggacttaaatttgccacttgaccaattgaacctaatagacatctacagaacactctacccaacaaccacaatatatatatttttttctcatcttcacatggaacatactctaagagtgatcacatatgcagttataaagcaagtgtcaagaaataaaaacaatcaaataatatcaagcatcttcttggaccgcagtagaataaaaataaaaatcaatagcaagaggaactctaaaacacagacactcacacacaaacacacacggaaactaaagaaattactcttgaatgacttttgtttgggtaaacaataaaattaaagcagaaatcaaagaattttttaaacaaatgaaaatagagacacaatgaacaaaaacctctgggatgcaataatagcagtttaaaaaggaaagattatagtgctaaatacctacatcaaaaagatagaaatatctcaaattaacaatctaacattgcacccagagcaagtagtaaaacaagaaaaaaaactacatccaaatatagcataagaaaagaaataacaaaaataagaacaggactgaataaaatcgagactcaaaaatccacacaaaggatcaacaaaatgaaaagttggttctttgaaagtgtaaccaaaattgatagactgcaagcaagattaacaaaaaagaaaagatccaaataagcacaatcagcaataacaaaggcgacattcaatcgagtcccacggagattcaaaagattctcagagactactatgaacatttctatgtgcacaactagataacctagaagaaatgaatacgttcctggaaacacacaacttcccaagattgaaccaggaagaacctgaaacactgaacagaccaacaatgaattacagaatgaattgaataagtaatagaagcctaggactagatgaattcatagctgaattctaccagacatacaaaggggagctcatgccaatcctactgaaactattccaaaaaatcgaggatgagagattctcctctaacttactctacaaaacctatatcatcctgataccaaaatatggcaaatactcacacaaaaaacaaaaccctaggccaatatatctgatgaacatagatgaaaaaatcctcaacaaagtacttgcaaaccacattcagcagcacatcaaaaagataatacaatatcaagtgaactttatacctgggatgtaagagttgttcaaatatatgcaaatcagttaatgtgattcaccacataaacagaatttaaaatgaaaaaaaacataagattatctcaacagatgcaggtaaaacatttgataaagtccaacatgccttcataattaaaaccctcaatagactaggcattcaaagaacatacctaaaataataagaaccatctattgacaaacctagtctacgttatactaaacaggcaaaagttggaagaattcccataagaataagaacaagacaagaatatccactttcaccactcttattcaacttaatactggaagccctagccagaatgatcagacaaaagcaagaaacaaaaggcatccaaataggaaaagaggaaattaaattttatttcttcactgatgataggattctatacctagaaaaccctaatgattctgaccaaagactcctagagttgattaaaaatttcagtaaagttttaagataagaaatcaatatacaaaaagcagtagtatttctatacaatgcaatattcaaactgagaaccaaatcaagaacacaatcccatttacaagagccacagaaaaaaaaaaaaaaaagaaatacttaggaatacctctatccaaggaggtaaaagatctctttaagtagaactacaaaacactgctgaatgaaatcatagatgacacaaacaaatggaaaaatattacatgcttatggattggaagaatcaacatcattaaaatgtctttactgcccaaagcaatctacaaattcaatgcagttcctatcaaactgccaaagttatttttacacagaattagaaaatcaattctaaaatttgtatttaactaaaaaagagcctgaatagccaaagcaatcttaagctaaaagaacaaaggcaggggcaacacattacctgacttcaaactatactacaaggctacaataaccaaaatagcatggtttgggtacaaaaacagacacatagaccaatggaacaaaatagagaatccagaaatgaagtcccatacctacaaccaactgatctttaacaaaattgataaaaatacaatggggcaaggataccctattcaattaatggtgctgggaaaactggctaaccatattcagaagaatgaaattagactcctgtctctcaccatataaaaaaattaactcaagattgattaaagacttaaatgtaaaactttagactataagaagcctagaattagacctaagaagctcttttggatattggcctatgcaaagaatttatgactaagtactaaaacacaaaagcaacaaaaacaaaagttgacaagtgagaccaaattaaactaaagagcttctgcacacttgcatgttatattgcaaatatgaaatagcaaagacatggaatcaacattggtttccaacaatggtggattggataaagaaactatgatgcatatacaccatggaatactatgtagccagaagaaagaatgaaatcctttcctttgcagtaacatagatgtgcctggatgccatcatcctaaatgaattaagatgtaaacagaaaaccaaataccgcatgtcctcacttataggtgagagctaaactttgggtacacaggagcaaaaggatggaaataacagacactggggactccaaaacaggggaaggaaggaaggcaaggtttgaaaagctacttattgggtactatgtttactattcagataatatgttcaatagaagcccaaacctcagcatcatgcaatatattcatgtaacaaatgtacacatgcatgcttaatctaaaataaatattaaataatcaaataaaatgaataaaacggtagatatgattatgtggaaaatgctttactatttattatgtggtgaataatttaataatatttaataaatacatgaatgaaaaatagctacaactgtgtgttaggatttcaataattttttatttcattcctataacttttatgtattattatatacataataatatatagttaataataacaaaaacaacatggtattgaaataatttccacccagaaggaggatcaacatatttaagtgactacactactcaagataaaaatcatttatcaaacagatcaaagtcatttacctgctttcctttttataggtcctaggaacacacgtgccatagacaataaaacatcacttcccccatcccactaccttggactttatttaacatctttgggtagaacagaaactgttgataaggtgagttttgttttatagacaagagaggaaaatggatactttgtgtggtctgggccttagaaacagactaagatcttttttttttctcttttgctttttttactagcataaaatattaattgacaaaacactgaatacaagcttcactatcataaaatcaaaacatttaagcaatattccaaaaaagatttgacaaaaactagtcaccaagagtacaaaaattacacatcaacacaaagcataaaaaatgtgaactttcaaattaaacagtcaaaaacatgtacctgcgtgatcacctccacaccttgactgccttcgtctgcagcacgctgctggtaaaggctgggtggctgcaccgtcgtcccctaacccaacattgctttcatctgggaaaattcgcttgatagccaattaagccatggaggctattacatttacacggggctacgcacaatctcaggggacgttcaaacagcagttcgttcctcacacgcactgttgggtgcaaagggcacctggagagtgagggagacctgggagctttcctgcggggccttggccacgcggccgtcgccggcaccctgtcccttgcctggcaggggacacaatatttgtacagattatggtataatttgaatgattttctaatctacttatcttaatttatatagtttatttaaatgtcaaggcagagaaatacattgatcatgttaaggtcacgtgatgtggtggcgcagtaatgacttcctgaggaaacagaaatcggatgttttgtgatttagctatgtgcactaaacttattttccatgttttgagagcacattaaacattcacgtacaatgtgggaataggctggctcgtaaccaaaacgtccaacccaatgccaccctttgaatcgctgtgaacaccatcctattgcggttcagagaaaacaagcaaggctgcgaagccccggggttcaggcagctgcagcgcttgggccaaggtagctccgctctctggtctgaagccacgtggccccaccccggggcggcctggcttttttatagtgcttattgctgtgtttggcatgccattcaacccatcgggatgttggatagtgacttgagagcaatccctagatttgccctgtcgggatgttgcatactgaattcggaataagccctgctcaactgaggcactatcactaggaggaggcactgattcccgcctttcaatgctatctattggtgaaagaggagttggatggcatctgggaaattagtatcacttctactttttcttcttttcttttaaaggttaaaaataccttgtattagttaatactgctataaaatatgaatatccaaatctctgtggctcagtaaaatagatttttttttcactcagagaaagttcaggttcacccttagtaacccaggctgacagagactcttccattttctatacatagcttccccaattgcccagagaagagtggaaagatttgataggtgactgtacacaagaataagaacttagtacctagtcactaatttactcgttgaataaacatttatggagctgaacatattaatcactgggcagacgctgggacacaagaaaaatctttaagatatgtcactgcttattaccaataatgttctagtgagtaacaagagttaataacacgactaattatagtattgtaaatataattacagttccaataagacatacacacacacagaacgattttgtctggttgttgaggaaatctttattgatttaagatatcttttgatgaacaggatttttcaataactatcagaaaaagaatgtctatgacttatttttaaaaactattttcttatctgccttgcatatctgacactttcatctcctatcttccttgaatacaatatagaacctgacatttctttcctttcaaagatccttagagcatttcctacatttaatctgaatgtctttctcagtaatttttcccatacaagcaattatggctacattttcttaatataatcatgaaaaggtgagcaaaactgaaaatttaatttggagaatagatacgaaacattcaattaattcaagttgttgttaggctgcatatgttcagctttcagtgaagatgaacaaatgatgataaatgagaaactgaaagaaaacaaaccaataggtgttttttaagaaacaatattattaaagtgcatgtgttttctactgaatgaaagcaacatagaccttttcctcacattggtagttagtaagatgtataaaaacaactttgtaaagaacaattaatacaggttaatgaatcattgtgaaaaggggataacacactttattgtagcaatgatctgcaaggtgttaaatgttaaaaaagatgaagaacaattgagtagttatttgatcacagtgtttattaaattgcttttcctgtatctggcaagctttacagaaatgtcttcaacagaataactgtgttaaaagccaaatgaaatgcattttgaaatatgattcttcacttggtgtgcaggtataatctcaggtgtaattcagacaagagacaaattcaattttaaagttccatttgttacaatttgatgattgtgattaaagaaccataaaaattttatctttgacatttcattttttcctcacaaaagtattctactgcaattttcttagttttctttcctcttaactgtggtgttacctataaatgctggatttctctgttttacgtgcaacaaatctacaatcaactatttctggaacgccacttcattttaacaacaaggacccataaatattttaaaaattcaaaatgttatatataaaatgttaaatgatacacataatacatttctaagtagtaattatgattatgcccataattatacccataatttaaaaatatgttacctgaagtaaattattatacgttttatgttggaagtgttcatttatctttgatctctgttaacacattgtactatgtggtaataatataaactgccttactggatagtgatgtatctttggtttcatattgttactggactaatattccaacactatagatagtgaaatttaacattgaaacaatttgataatgccatcaatgaatccagtttttaagagtgggatccattttctaaaattgagtatatagatacttcatgagatatcttatcatgcatcctaaaccaaaccaacctcttcccctgactgtcttacagtgtattattattattttatccaccacagcaactagtacatttttcagaacctagtagatattcagtcattgtctatggaatacatgaacacattctgaatttggacagtcatcattcttggtgttttaaaacaaacacttcctgaattgcatccactattttctaagaagccctaggaattcattgaaggagggtatgggtaagttgtgggtgaaactgtaaagatgtaggtcctcctcccaaaacttcttcagcgtatcttcattgctgtttgtttgcttgcttgcttgcttattttaaaagagatctagatatagtctaataagaattgtataaatgtgatgttccacaatgattctaacttacatggtgcaaaataataaaatattacattctacctgtttgtagaaaaccatggatactataaaggatctagattttctctctcctttccttctaagatttattcactcagcaaagacttacctggtgactacttagtgctagacactgttttagatacttgggctataacagtgaaaagaacagtaattgaattaatgaaaagttcattttaattagctgtatggtaaaataggaaactaacaaaaataaaatataacatgtcaaatggcaatgactgctctgagaaaaataaaggagaataagagattctaaattattatatacggccaatattaccaacatattatagaaagaaatgagttcataatgtttatcagagaattccatgaaaatagctaaatttttctagaaagccaggcactgataagagaataaacaaacagataaccgattttaatttgatcttctcttacaggtgcagctatgatctgccattgtatataatataaaattgaaaattgtttatatttcattcacgttagcatataatgttcttacttttttttttttttgagacggagtcttgctctgtcacctaggttgaagcacagtggcacggtctcagctcactacaacctccacttcccgggttcaagtgattctcctgctccagcctcccaagtagctgggactacaggcaggcaccaccacgcctggctaatttttgtattttattagagacggggtttcaccaaattggccaggctggttttgaactcctgacctcagatgatctgcctgtgcctcggactccaatagtgctgggattacaggcgtgagccacagtgcccggccaacgtttttacatttaaatatcagacatctatcatattcctttctccctactacaaacattgtatgcttttcaataggcataagattttgttttcactcaggttggattcaacaggtattatttagcagttcattgcatctatccatttacccaatagaggaagtatacaagatacaaatgaataaagtgtaataattcttatactatttgcccttatgtcatgtaactgctccatgtttgtattccgaaaacctaactgggagggaaaactcagaaaaatagaataaaaagtattatatatctcatacatcctcatttttgaatattctaggggtacagatcagtataaataaaatactctggtaagtgaccaccacatcatctgtttgtcattcttagacccagagtataccattcttttaagaaagaaaacttgctactgtacctcctacccagtaacatatatatcacatatcatatatatatcataacatatatatcatatatcatatatacacatatcatatatctcatatatataacatatttgctactggttaggagtaacactcagaaaattatacttaataatgtagtacaattaggtataaattcacttagtatttttaaattttacgtatattcctatttatatgaatcgtcatttaaaatcacatctactgatcctgatagcattaaaggcataagaggtactgaggatattaatttaattttgtttacagctatgcacagatatttttagttcactgagatttaatccagtagtctattatttgattaattgtacagctatcaaatcattcaggactcccactgtttcaacaacgagagtggaaaaatattttttcatttatgtttatatgcagctatttgtagtctaaattaatatcctagcaattgatggtgaaattaaaattatttctgtcagatgtggtaatttgatgacagtggataagcatgggaataaaagaaagttttgaggaagaggggacagtttttgtttacttaatgattattccaaagatgttaagtaaacattctatagaatgcaacatatagtggaatacagcattgaaacaatttaataatgtagtcaatgaatccagtttttagaaatgggatccattttctaaaactgagcatacagatacttcatgagatgctttatcacgcatcctaaaccaaaccaactccttcccttgactgtcttgcagtgcatagggcatctctacactctaggaaaggaattatcaatctgtttatatgccacttataaaatcatacttaatgtacgattaggcataaatttacttgcatttttaaattttgtaaaatgttaatggaaagtgttcttgaaaaacatttctgagaattccaaaaaatgaacaaattttaatacataagggacaatatctttctagtgaattgattatcagagtgtaatgtggtatgttctgattatgttacataatattctgattagcagaaaattttgaataagtgaatttagcaaaatgtttagaggtcaagaaaactgttttagactgactatgttttctgacccaaatgtaagaaagaacccaataaaaagaggcagccagataatgctgttgtttgcaaacttaaacagaagcttgcatgtaatttatgactcaaagaaaaataaaaatagaagttatactttatttagaacttaatgacagtgaaaaattgcacataaaaaggaagactgttgaatacagcaaaagctggaattatataagaaatataaacataaacacacaaaataagtgtaaattataatgaagtaaaaatatatcaaagagaaagaaggaagcagtacaataaaaaataaagttgattctttaaaaaccatacttaaatagacaaatttccagccagattgtttaccaagtaaagagaaaaagaaggagatagatcaaaagacacaagatgatgatgaaaagagggtcagcacttataaacatagtagaaatttaagccataatgagcacaagaaagcattatcaacttacttttgaatatataaaatagacacttaaaaaactgaacaaaaatgacttactagttttaaaagaaaaaaaaaaaaacatcaaacatctatccttccaaaagtatagacttcaaaagtatagtcccagatgggtgaacataaaccacactttaagcaagaactctcagttataaccacatgggtgaacataaaccacactttaagcaagaactctcagttataaccagatgggtgaacataaaccacactttaagcaagaactctcagttataaccagatgggtgaacataaaccacactttaagcaagaactctcagttataaccacatgggtgaacataaaccacactttaagcaagaactctcagttataaccagatgggtgaacataaaccacactttaagcaagaactctcagttataaccagatgggtgaacataaaccacactttaagcaagaactctcagttataactgcttgcagttttagaggatcccagccacactcctgaaccagagcttggcactgggtattccctctggaacacccttttatttccttctctaagcaaagacatggaatcaacctaaatgcccatcagtggtctgctggataaagaaaatgtggtatataaacaccatggaatactatgcagacataaaaaaagaacaagatcttgttctttgaagggatgtggatgtagttagagaccattatccttagcaaactaacacaggaacagaagatcaaacactgcatgttctcactcataggtgggagctaaatgatgagaacacacggacacatagagtgggggacaacacacactggggccttttggagggtggagaattggaggagggagaagatacaaaagaataactagtggttactaggcttaatactggggtgatgaaataatctgtacaacaaaccaccatgatacaagtttacctatgtaatgaacctgcacttgtacccctgaacttaaaagttaaaaatgaatgaagcctgtcagaaccacccatttagcagtctaacattttccctagtattcccaaatccctttgcctagccaacatttttcacagcactttttgtcttcaaactactggcctgaagcaatctggcttagctttctgagtagctggaattgcaggtgtaccagtgtgcccagccacagttttttcaagacctgtttaagacaacaggttagagaaaatcaagataatattttgagggggaagaaggtaaaatcaattaagacagggtgcacagagtacttgaatggtacagataatgtttatcctttgtactaaatggtgtgtatgtgggaattggttatattattttgactgtttgtagtcatattatatacatatgtgtataaataaaaataaaagaaaaaatataagctaaatttatagatatattaattttatttaaatataacaaagatttgccagtattcaaatgtctgcaatgattcttaaaatgcacagaacctgtgtttaggtacagtatcactgttcatccagccttcattcactcgaatctactcttacctaaaatttgtaccgtaagtaaaattacattctgtatgacagaaagcaaattacaatattagaacaacattatggaaaattggcataacattgtacaatcatccattactttattatttatcattttgcaaatttttattatattagtaaaaaagtctaactgtacttaatagctaatacatatattatttgatatttttaaagaccattattaaaataataataatttgggggtgagaaggcctattgaaaaatgaccaacgtggaaatcataaataagtttgatgcaacaaatatttgtgagtcttatagttaaaaatgtaaaaattcattataaacaaagctaaaagacaataatatgcattgggaaatatttgcaacatttacttcaaaggtggatgtccttaagagaatttttacaaattaataaacatttaaaaaggtgaggagtggcaatagctatgagagacaatttacaaaaacataaaaaatatgaaaactgtttaatctgtaagtacatcaataaaaattttattattgtagttattttatctattaaattaggaaaggtcaatacaattggtaatcttccaagtaaatataggggagaaggtctttctcatacacttataagaatattattttgttagaatgcaattaaataaacacttggtaaaaatccatatcctttgtccaaacaatttaagttctagacctctagaatccacatgtacatatacatatatacatacatatacacacacacattcacacctatatattaacaactcaaatccaactccaactcttttgtaagtagtattttgtccaacaaataaatttatctcaaattcttcttgacttttctccattatagagccagcaattctacgtgtaactctacctctaattcctttatttgcatttatttctgctttcaaacccttatatgaggcaagtgggattaatttatttcattaccttaactagattcatcgctttactttgtcaaactctgattgatttgctcaactcaatcttatgtgttcaagaacttaatgtggattcctgttccaccttatgaaagtcttttccaaaaacttgctaaattcttgactcaagacattgcagtcagtaatgcatttctctcctcaaatacaatggaactgtgttctaataaatactcttcaacaatgtgcagttatttctccacaactatcaattccccttaaagcagaattttactaaaaatggctttatccttctggggataatcagtaaaatggcaattggtgggtgaattaaaaatatactaaaagcagatggcagaacatgagtgcagatttttactacaaagcttaggaaaagcaaaaggaacttgaatagagaaaatgcagaaaagccctcctttggctattaggacggagagagcagaagtatgtttagagcttcaaagagtctgactctttgcaactgtttatcttaggactttaaggaagtaaaaggtgcaagtgaaacactctggattataaaatagaatctgacacagaggattcaacccagttaatatgcatgttgcttacatggaaatgctgagaaatttttagcaaatagatagaaaatgacagatggtaggtatatagaaaataattgtaggaaaaaatgtaaaatgaagatttatggtattccttttatattttattttgttaatatgttgcccataatgctttatttcaaagaatgcaaaaccaaaaaagtagtcccttcctaacttcccctgcagccttgtcttgtggagcttgtattttacttcatgagaaatgccaaggagatgtcatttaagctgaaaacctccagcagaattagccacaatatttgggaaaaagatgtttccagaaaaagaaagagctagtataaatgtccttaggcaagaaagagctcacgatgattgaggaacaacaacaaaaaagattatttcactcaagaaaagtgaattgggagtacagatacaaatgatgaggtctgaatatgattcatggggcaggtcacactaggttgtttgggtatggtctaaatgaatgcgcggcatgagttgctttaaggagaggagtgacatgatttgacaagttcttaagagatccctttgattactctggggagaatagaacataaagtagcagaaatgaaagcaaagggagatagtaggaaataattgcacatttataagcaagaaatgatgttggcttggactctggttatagcaacaaataaagaaaaaaggaaatactgagaagagttgattggatttgctgacattctcaacataaatggaagtcagtatttttttctaataaatataatatgcgtaaatatttttaaatatttaattcttttaccactaatggggcacgagtagacttcagggaacatgccagtacagaaccatataaatgtgatcattggtagagataggaattaataggcatttgaatgtctccctcaacctggaataccacaaataaagctctttgcttttcatgttgcattgttatcataccctatagttttctgccattttcagttacttaatattatgttttgcctcaatagattatagtgctttctcttgttgtgttatatttgcagcaattattagtgaagttttaaacttcaatatcacatctaaaacagagcaaaattgttgcatactattttccattaaaacatgagaccactatgacaaaaaaagctaaacatgtcatgaaatgacttacattggatgaaagtatatgcaatatattaagaaataatctctgactttatagttttttatttgtagtttttactagaacgtgaaatcaatatgtgaaccctggctggagtttgcatctaaatgtaataaaataaaagaaactttaatattatcattgaagcattaatgtacattagcgagctggactatataaaataaactttattatatttagcatttgatttttatttatgtatattataaaatgaatatagtttatattataataaaaataaaagaagtagtatgttaactaattagtataagatgcctacaaactacatatctgcctaaatttttgacccatgaaacttcaatgatttgtgttaatgttaaggcctacatttatttatatatatatataattaggggaggaattgttaattctttcattttaaaaattttaactttgcagacaaagttgactatacctgtggcagaacactgcaacagctataaataaataaataaataaataacttttattttctgtggagctcccagaattatgaattattctgtagattgagatttgccaaggtccttttcttagagttgcaagagcataggagaaagtcaagggaaataataagcagcacttgatttcctttaccacagtggatgggcttctaaaaccaaattacctgactataaatccagatctatcttctgcaggctatgtgattgtggatgttacctcttctgtgcttcaatttcctcatctgtaaaatggaattatagcctaccctattttgtagtatagtgaggataaatagaatgaatgtatgtagttcttagaatagagcatggcacgtgataagtggtcaataaaatattgtttactactagttatgtaacagtcacttcacacataataatgatttaataaaggaataagaagaatgtagagcacagcttctcaacattggcactatgacattttgggtcagacaattatttaatgcagagggggctataggatgcttagcagtgtctctggccagtagtgtacctcctcctctccaagttttgacaatcacaaaggcttctagacattgacaactatcccctgaaaagtaaaattgtccctgcttgagaacacaaatataaagtaaccactcaaagattacattactaattttaattgaatttgaccagcattatgaaataagcataagcttaagtttctacccttgattttgtcattgtcagttagggcagcagagaactccaattctgaaaattctgaacatgtgctaataccctacaatataatcaaaactttcatttttgaattgtatttcttaaaaattagaaaatttattaagcagcaacatggaataattaaccacaaaaatgttgaacataaatctcatttgcctaagttctcttttgaagtcctgtttcactatataagtattatgtgttttgtttcacagctagataacagccagttttttctctgagcctaaggttgcttctcaaatttatggtggcttatagctcttctaagtttctataaaacttcagcaacctgcagcaggttgaaatttattgatattgagttattcaccaggtcatattacaaagtcagggactgactcacccaaaccagatgctccccctgccaccagatcactaggagatattgcaatcatttcccctggctactaaattagcaaaaattctcagggagagagaagggcaagatggcacagtttaatacttactattattcttttattctttatcatcattccctttgaatggattaagaatctgacataaatataacttgctaaagaaagggtgttaggtgagagggaagtcatattggtctaagaaaagtcttagagaaatatttgaaaagaggtagagagaagggttggattggagtgggtgggtggggaatcacactaaggagatggatcattcataatttctttagacatggtgaggcagccacaggagtctgaacttgttgaaaccctagtctgaagccaataaaagtgctcaataaggtcacactttgatcttctctgcctaaagcagttattcaccctatctttgggagaggaaacatctacaaacctttgttctctttgttagcagagggatgacatgaatttgggaaaaacgtttgagagacaaaatgagatttagctcgagcaagtgatcgacttgtgctgggttgcaaatggactttttcaacaggcaggttgaaactgtgcttcagcaattaggataccagatataaacatccatgcacagaattggaaaggttcagctttcatggttgctatggtttgaatgttccctccaaaactcatgttgaaacttaatccaaaatatgacaatatagagaacgagctttttaaagaggggattggatcatgaaagttcttccctcatgagtggattaatccattgataagtcagtggattaataggttatcttgggagggaaaccattagatttataagaaggggaagatagacctgagctagcatgttagcatactcagccctcttgccatatgataccctgtgctaccttgggactcttctgagagtccccacaagcaagaaggctctcaaaagatatgccccatcgaccttggatttccaagccttcttagctgtagaaaataaattcagttctttgtaaattactcagttttaggtatactgctataagcaacagaaaatggactaagacaatggtcttatccagaactttgtaaactagaattggctgtttagattcagtatgtattttttttatagattcaaaataattttgttttgaactgtacaatgaaggagtgtcataagcttttccacatgtagaggctctaaatatcagtctggcattgtgataaagcagagagtttaaacccaatcctatttgtgccccatgaccgttctttctggttacagttcagaaaagtaggaatggatgtgtaactcaaggagaagcatataatacatgaagctttttctcaaaattttgatttagaaaatgaggtattttagtatgttaattataggcatctcaactgagaagtctaatagcattgggccagaattgtcgcagcagtccaaagccatggataaacttaagttaaagggagcaaatactaacagccttccaaattaatctgtattggagaagatgataaacagatgaatgggaactagaaaccatgcagacttggaactagatataaaacaaacagctatctaatgatttcttatttactctgagcccaagatatttttgtatccttttagttaaacctctgttttactaaggaaatttaaataagattctgtctcttgcaagaaaataacatctaagacatcttcgtatttaatactgccttaattttgtttactccagtggtccccaacctctttggtaccagggattcgtttcgtggaagacaatatttccatggacagggttggggggaaggtttcgggataaaactgctccactactcagatcatcaagcactagattctcacaaggatcaaactagatcacttgcatgcgcagttcacagtagagctggtgcttctgtgagaatcaaatgctgccaatgatctgataggaggctgagctcaggagtaatgctcactcatccacctctcccattctgctgtgtggcccagttcctaacaggcccggtaccagtttgtggcccaggggttgggacccctgttttacactataacatttccacacgtctctcatggcctttcagatccactgcttgtctcaactcaagtccagctacctgaaaattcgattattttttcaaagtgaatttgaatatctttatgttgaatacacagtctccacttttacgcagcccctactgtcttctatcatacctctctagccctggaagagatcaactttacattcacttttcctgttttagggctattattttatcttcaattaccaaaatctatctacatttagatactttaacttgcaaatacatagtaaacaattacagattatttaaaatagcagttttcccatgagtataaaaaaaaagaacaataaaagcaatatttgttgagtattttaaagtgccaggcactgagcagtgtgctttgcttaagtaaatgtttgacaaaataaaaggtcctttaaaagttccatgctttaacattaataaccatataaagataaggttagacttcctatcaaattagcagttttgtgaagataggccttttctgctatatagaatctcctcaaacctgagtgttcgtattatggattatctagtatactccatagctatcaagtttgtgtatgtttctttctcaagcaagttatcttatttctccttatttcttcagacttatcctttcttttcttttcttttcttttttctttttttttgagacagagttgcactcttgttgcctaggctggagtgcaatggcatgatctcggctcatcacaacctctgcctcccgggttcaagtgattctcctgcctcagcctcccgagtagctgggattacgggtatgtgccaccacgtccagctaattttgtatttttagtagagacggggtttctccatgttggtcaggctagtctcgaactccgcccgcctcagcctcccaaagtgctgggattacaggcatgagccaccgagcctggcccctaacctctcatttctaaggaaatgacaaattaagtcttttatgcaaatacagtgtagggtcatttaaaaatattttttgtaataggtgtctctgtacataaatctatttaattttttctcttttacagtaaaaaaggcaatactgtgttttagtttcaccaaaaatttcagtagaccaattgtgtaaagggatacatttatatgaatttttttgacatagtaaaaactaagaggggaagttattcaaatatttcagcataaattccctttccttgaaattgcaatcgtcatgtgtagctacaattcctcagcattcctctgtagtataagtagctacaattcctcagtataagaaacactaaggtggaaaattaattgttaagagaacaaagtcataacaaaacaacaaaacaaaaaagtaggatatagaaacattaactcaatatcactcttgaagctcacataagagaaattattgtactagacactgtggttcatcatccagaccccatcttcatgggaagacatcgatcccacactcatggggaacatcagcagctgacaattcacacctgtacctttcactaaatattgtcctaagacaaactaaaatgaactaactcgcccaaagtggtgcctcctttcagagagcagccattgacccatggctggctaatgtagttatacaaacatgcaactgctttgcatcaatttgggacaactctgaaagaggcccagtaggattggctgaagactcagttcaaagttgtcaaataaagcacaccatgcccagctgaatttacattgtttactatgagtatatcccacgaaatatttaggaattacatatactaaacattattcatgatttatatgaaatttaaattcaactgggcaacttgtacttttacttggtaaatctgggagcttttccttagttgcatctgcatggcaggtaagcatgtcggtatgcccagacctcccttctttgcttccttataagtgcgtcccagaaaacaagcaatcatctcagagccaataggcattgaggcttttgataatcaaactcccaaaggtcaaggaaaaagagagtatcccaaaagcaccaagagaacaaacaaacacataacatacaatggagcttcagtatatctggcagcagacttttcagtggaaaccttacagccaggagagggtgacatgacacatttgaagtgctgtttatgggtcccttcggattgtaacggggaaaacaagaattgtagcaggaagaattaaaagaaaagagagaagctttttttttttttaataatctgatctttttctattgagaggcaggcacccaaatgctgcttctgtcggggagtgaatctgtaaattctttgtaactctgtgctacctatttgttaacctgtgtaatttgttctcctgctgacttcttgcaaacacttgccagtgggtatctgaagcctcttacatcttctgtggcacggacttggcctatatttagcatattcactcatctaaagtgggaagaagaatctggcatcttttctctttctccatcttgccatcaaaagctgcctcaatgagcatgtagccttcagaattttgaaagcaagaagcaggcaacaactggccatgtttagcttcatcttgaaactcttgaggacacctatcaaactttcccaaaactgtctcatcatgtatggttccattgcaggatgggtgcaatgctgagtgccagaaggagagggatatcccattctttccttcttaaaaattgctcccagtctttttgagctctcttcctgtttggaaggagaactaaagcaagtttagttctccttacaaaagagaaaataattaaaagcactctcacttaggtaactaattcactttctatatgataattcttagaatgtctagtcctctctttacataagagtacaggtaattgaggtcagtgaaggttttagttacagaactggtctggctactttttattaaaacctgcaaagacttaactgttcttctataatttagggatactcatcatttaatagggaataaacaaaaatttgagacaaaaggaaattctgtatccatttcatatatatacatgtaaattacatatagaaaaaatggtttagaagaggagttaatatcaatttaaaaacgggaattttaaagctgggaataatacatagcataaatatgtataaggattcagcaaaatgttagttgaaacagggggctaaataaacttgaagtttaagaaagttaagaaatgaacccaaatatgcataaatctgaggacaaaatttgatattgctgctaataaaaaagggaggggcatcatattgggaggcttcattaataaaagtaacaaattatgagaacaaatagtcttgttatagtttatctggtgaagcattttaatgaggcatagctgtctgttccattaccgaacgacttttcttatgtgtgctctggtagattttcatatggctacactgaaagatattcccaaatgtctgactaataactctatctataggcaactgttctgaaggtttaaagtaaggaggatggggttcatttagaaccagtgggaaaaaatgctaatgctgggctttgaattttatggatgctgtagctgttatttttcaattaaataaatgttttatatgccatgttttgtagctatcgcagttaaactgccctcatctttttgcccagcaaaaaacccattaagatcttcactgagattgagtctaggttttttataaaattaataactttgctactggtttctcaaaaatgagtagaaatgacttttcaatgcaaatgccagtttttgatacagtgaaattatcctgtctgcagtgactatttgaacttttatcggcaattggacactgagagacttagtatatgaacagatttatccttagattatctaatacatgctttgcgccctgcaccataaaacccgatctatttttaaagccttggttgttctgaaaaatgaaatgaaattgtattaaatggcattttgactggggagaaaaaaaaaaacttcatgtggtttaagagaatggatgccggcaattgactgtctactgtttattcaaaacttatagattagcagccagatgtggcagaaagttggctgatttttcattcacaacaaaaacgatgctgtgcttaatgaatggaggtttgttatcccagtaataagtaaaaggaacatgaaagcccttgtgtttaatgttcatgcaaataagctatttgcaggtggcttttgggcagggtcaagtattttcaaatatttttcaaaactgggtcaagttttttaattgtcaaaaattaccagctagaggaaaacctcctaaaaactttattatgctatttcccaagtaaatgaaatgacaagtcacttatcatttaaaaattacatatgaaaattcttttccttatgatttcgtcaataaataaattctagaggattctagatatatttatttggcatttttttttaatgtggtatcaaattttgtggacattctttagagaatcaaattcttaaaatggcattgaacatttaatttaaaatgtccttcttgaaccatacatgtttattaaaaagttattttatataggttatccattaaaaaacaattttctatatatgtaaacatttatgataactgctcattattttggtccatacttatttatctacctatttattaaacaatacaaatcatacgctttgtaaaaataaaggcctagtctaatattactctctgtcagaaataaaataattcagagaagtctgtattagaagacaaaataaaacaaaacagaaaatgatgagaatcacaaaaccattgccaaatttccagctatggcatttactctccatgtggccttaggtatcttactctcttattttaacctttctttgattactgtaaaaataatttgttactaagaagccctcttgctttagtagctgtgagtataaaattaagaacataattctcaaaaagtgttttagtcttcctggaaacattttaaaatatcaattaatcattgaacaatacacaatcgcctgatcatttgctaagagagggttgcattctcatctctgttcacttctgtcctttctgagacttacacaggtatgagagctagaaaaaatattaatgtgtagtaattcaaaatttctcattcatgaatcacttcagcagtgcaaagaatactttgtaatttttaaaaggcatttttattaatatacttctactattctaccccaatcaacagcaaatttacctaaatcatgagactactggtacttctaatttttagaaaagaatgacataaactgctaataaacccaatgaatcctttacccgcaatgagaatgtccacgagtcagctcttctgaccctctggccagtgttctggagttactgatctccaactttctaattgaactctagcttggtatgtgagagcagccatgggtgaaccagtggagcaagatttaagccttgacattgccattaatgattcaccacctgttgcaagttcaataagttattcacacaccaaattgtggccgcagaattctgggagataaactaagttagaaagattgggggtgaataaatgtttgctaaatcagaattgttaatgatagaaatctgtatcttaacaaagttgagaaatcttgtcttcttaacgtgtatttattgacttcccaggatatgtcttagtgaggaaacatagcttctggcatttattattagagtgataaggaataataaaccacagtgcttgagagacagggaaaggcagggggagccagagacacagtaacagaagcagattaattgactgatgaaataaacttgagataagagagcacagaggaggttcaagagatggaaccatatattcctctctatctgctcccaacatcaaggaaattcatagcatattttataatgaatccctgataaatattagtctataattgaaaatctattaaaatgactatttcttagggtacacaaaaatattacaacaaaacaagtaaagaaaagttgccatgggatggaatattatattttcctgcatgtctgcttcaaggcagaatcctaatggtcatgtatgtaggtaaattattctttttacagcaacttctgggaggtggtatttggtgcagtataaaaggcaaggggtgtagtgagggtaaagcgtaagtactttgatcttgagccttgactatattggacttgggatctcggaaatcttggggataagcagtggattaaatccataaattagtaaagtgttgattatacaacaggtagaactacgtgccacttttggagggacagtcttcttttttaaaaaaaacaaaaggccttaaaggctttatgtatatataaagccttttttaattataataaatacatttttttaatgaaacaatctgcacatatacaattccactctcaagaaaggcagttatttacataattatgcagaaattcctataattatgaaaataattgcctttcttcagagtggagttgtatatgtgcagattgtttcattttaagaaaagaaatatttactgatttgattaactgaagttctggatgcttaaaaaatgattaaaatacacagatctactatctgtcttcatgaactttaaatgtcttgtaagaaattcaagtaataaagactacaacatttattatttaactggaacatgtattatttattatcctaactgtggttaggaagcaccattatttattatatctatattaatcaagttgtatcctgtaacaggtttcctgttatccactcatgtcttctaacttctgaagtattgtttaaattacaagggagaaacctagacactacattttctaggatctcaggacaatagagctccaggtgaaattatgctaaataagggcatgagtgtaagatgtggatgtcacagtgaagagatttagagcatttttctggtgacctcctgtttaggtttgacaagcatctaaaatcattgttagcaactttcccataattattgcattttcagcctttatgaaaatagcagcatttttttttcctttctttgcccatgcacaccatctaatcatgagataagtctccttctgagtccctaaatacatgacatacatagattgggatctttttctgacctgttcctgtctgatacattcttcaactctaagatgagttcatactcatcttctgaagcccctgggaaatggaaatattttttcatattggatgttggtagagacccatcatttaatgaacatttatgtgccaggatttgtacaagacacttagatacattattcatgtacctcacacaaatgtatcaacaacacaacaaaatgtctgtatgaaataataattattatatcccttatatggaaacagatccagagaggaagatacactagcatgtgtaaatagaggattcaagtattaaacatccatctgtccaactgactacaacctctttcataaaatgctaatttctctcctgcttctaattttcttatcaaaaattgtcatctattgttattgggtctatgggtgggtagtgactccttggtttccattttgttctagcggattactgtcttctttatttttgttctagtgtttattgagagtcctaattaattaacctggctgctctgacttccatcagctcaccattgtctcttctcccagctcataatttctgtaacagagctctaggctatgctgaagttctgctatatgttgccagtctctctagatccaagtgcctcttgtcggccaagtttacatgcacgtgtttaaaatcttcttattgactctatatacaaagtcttcacatgccttcctccttaaaataatagcattgtgagaagaaaaaaaaaatcatcattctttttaaaactaattcaggatgtctatgttatacaacaacaagacgtgggggaatatttacctggtagttctgtccctcgttatcattctcactcattataaaattggtatctgaaaaaaatcttgctgcaaaaacaaaaaaaaaaatgtatagggtataaagaaaaagtttgcttcacatcataaccattacccatcccattgccaaagggaagattgtacactacatgattccggggagcagcattcacatagactatagtgtgcatggtacatgcaagagaccccatagtactacccgctttgtcctccttgtagacatgctcacagatgatccatgctccctgacctggagtagtcaaataaaagagtagcatcaatttattaagattctttccagaccattttctaggtattcccattatatattccttcaaatggaaggattttattctgtacatcacatctcactgtacacatttttttctgaaatctgaaatctgagtattttaattttatacagtttcaattgtgagaagtacctgacagactgacctgacctaacactctctaagctaaaacactcataaactagcatagaagctttacacatttatccatttctctaatttacttatctattgtttcctgaaacatctattaatcttgcagttatttgagatgactgtgagcttactatttgccagggatggcatgagcaccttggtttagtctagtgcctggcatttattttcctaaactgtggcagcaagtttagctgtaagcatattttttatcagaacaatcatccatctttaactacatgtgaggaaagtactttcttatattgcattacacatttttatatggccacagaaatccttacttagtctgacaaaattatggtagatttctttctcctaaggtcaaggaaagaatcattctgtactgtttccatggagatgtttctccttttctcaattgccaattgtctactgtgtgtcctgggttccttcttttcatatgtcatgaggattctcaccccagcattctgctcctctgagtcaaagcccttgactttcacttctcaattgttttgtttgcagtttttttgctttcctttatttttcttactctataaatgctatgaaagtgtatgtaaaaatttacccatcttttagtttatatttgttatcaccctttattcatataccaaaccatataggaaatgaatataaggagatctttcttagtaggaggtagaagtaaaattttgtttagaataaaaacagaaaaaaagagaataaaattccatatcaccagtttgcttctaaatgcccaatgtttccacttatgagcttgctactgtacacaacgcaagggcttgtaaaaaattgtctaaatgatagtggttaaggacgtattttaggctaggttactttaaaaaaatatatcatcacttctgccgtcaaaagtgaatttgatgtatcataattgttaaagttgaggagggtcaaggattcttctcattctatggtttccttataaatacactttctaataaatgcctaatttttttctgtgaaattaaaccattagatattgctgaatgtctgtatgtttcttacttttctagaatctcattcttaattatagttttatatttttccttcaacaaagtcttaaaacccatgcagctggtgtctattatttacattctgtgatgtattttatttgactttgtgtttttagtcttttcacagaaatccttttattgtgatcttcttgtccaaaagcacttatttcatatctcttttccatacctatcttcattagcaggttgcatttcagtttcttcagtccttttttagataatatattttactacatctgccttcacaacactgtatacgctctgatgatcaggtctcccttctttttttttttaaaattctcgtcctctttgggacccgtgacaaagtaaaaggcagatttttttctcacctgacttaaaagtaaaaaggtggccgggcgcagtggctgatgcctgtgattccagcactttgggaggctgagaagggcggatcgcgaggtcaggagatcgagaccatcctggctaacatggtgaaacccgttctctactaaaaatacaaaaaaaaaaaaattagccgggcatggtggcgggcgcctgtagtcccagctactcgggaggctgaggcaggagaatggcgtgaacccaggaggcagagcttgcagtgagccgagatcgcgccactgcactccagcctgggagacagagtgagactccatctcaaaaaaaaaaaaaaaaaaaaaaaaaaaagaagtaaaaaggcttcatatgtttctcctctgattcttcttaggcccagcatttccaaaaacaaaatagtacacaaaacattagttgtaatgatacttcaaaaggttcaaatactagtttttggctgctttctgtctatatttttcttctaaagaaattttgttatgaagtattgaactattcagtatactttaatattttccaaataaagtttccaaactgatatttaacaatattctcttatattcaaacatattctgaactattttctgctgtgtctctagatcaatatttataaatctagattgttcatgtattttttttcctttgctaactttcaagatcatatcaaaaagcaccactgttgattccattttttatgtttcattatttgaaactatattgacatttttcctcttctttatcattccctgttatctcatctttgtgagtcttccaattaatgttttttcctttgaattatttattttttaattgaaaataaattgtatatatttaaggtgtaccacatgatgtcttaaagtatacatacattgtggaatggctaaatcaagctaaacatacgcattatatgcattaccttgtaatcggaccccttgagatgtcaatacctcagcatttttagtgattgagataacaaaaattcgaattaggcccttgcttgcttgcataaaagccaacatcccttgttctcacaatacaattgcaaactgctgatttactatttctttgtcaaccaggagaagataactttaaggtaacaaaaaacatttgcagaaggaatgaatgcctataaggatgttgcaactaactgctgaggcccagaagtctggttgctcaggatattatcagagattaaagaaacacagactttccccttggttccctaaaactccccctctcttactgtctagctgcaaaaatatcctctctgcattttttttttttttttttttttttttgagacggagtctcgctctgtggcccaggctgcagtgcagtggcgcgatctcggctcactgcaacctccgcctcccaggttcacgccattctcctgcctcagcctccctagtagctgggactacaggcgcccgccaccatgcctggctaattttttgtatttttagtagagacggggtttcaccgtgttagccgggatggtctccatctcctgacctcgtaatccgcccgcctcggtctcccaaagtgctgggattacaggcgtgagccaccgcacccggccccctctgcttcgtcttattgttaagacatgtctgagagatcttgccccgttctcactttggccaaatggaataaacttttatctatccccaagcattggtgtgtcagtgtttggtttcaactgagcatcaggtacatgagcccgaatttgggcctctacaacatcttcacctacttactatattttgtgtgtgtggtgagaatacttaaaatctactctattggcaattttcaaatataaatgtattgttattcaccgtagccaccatgatgtgcaatcaattttttgaacttactcctcctggctaactggaattgtgtgtcttttgaccgacatctctgcaatttccccatgccctagcttctgatgactaccaattaactgtctgtttctatgagttttacttatctaaactctctatataagtgagattatgtcatagttgtttttaagtgcctggcttatttcacttgacgtaaagtctcccaggttcatccgtgttgttgcagaagatttcttccctttttaaagcccattaaccttttatagatctggtactgaggcaatgcaaacttattggacaattatatgttatttgaataaattgaaacataacagcttataaagggtcaaatggcagttaatagcctaagaaataggtttggaatattatttcttagcataaaggataatactggtcagagtcttctaggcttgaattcttggctacttagattttatcaagtaaattgtaaaaggatagtcaatcacttttttcacatgaattgctgtatgaattttgatttgacaagaaagactgtgaaaacaaaaccactattatctgtgaactacctaatgtggaaagaaatatccttaaataaaactttgagaaagtagattactcaattttttccgacagatatcccatatattgtaactaattataatatttaattgaatacaaaatctttcttcttaaggaaagattttattcagttttagaacgttaaagtttctccactctaatatatacagaacttctttaacctttaaaaatattgcttcacttattactcatgataattgggccacatacataattaaaacacaccatttattatttacccttgtaaaagtggcatctggttccccaacttagcttcaaactgtaattttaaacaaataataaagtgttttgaaacattaatgtggttaattgtcttatctattgtctatgttcatcaggagctgtgacatgcgcaaaggaaggtaatcagaggaaggaagagaagaagctaagttctagagaatccattaatcatggtttagatgactgaccattttattattttccattttccatttaaaaacgttccatttttaaattggaagggggtatgttttagaatagaataacgaaattccctccatctcctcgtagtgtacgtgattaagaagaacctaacagaaacataaggttctaaggttcttgctggaaataataatcagaactgtaagaattctcttatagaaaacatttaaaaaaggaaattctagcaatagaattcattgttaaaactgtaagtcacaacaatattgtctctgcatgctgactgtactcctctgtaatcttcaaaggcaaacaggaacagtaataatcttttcatgtactcttaacttccttctctgaaaggctagaaaatgtcttatatgtagcactcatactgtcatttaatcaaacccagtttctgtttttcttcaatttctaggggaatggctacttagtctttctggcataatgtgaatttcttaagtgtctgtagactacatctcctatttttacttcttgaagtttctctcaaactgtgataaagagtgtcactctatcggtactgttaacaatgtaaattttgtttctctttttgttactgccaagattccactgactgttgaaatataaaagaaaaacagcattaaatcaggtgtgataaaatcacctttttctgtttatctccaccactggcatttattggcacttggaaactatttataaactcatactcttgtaacagtcttgtaactgaaacccactggattcaaaatctattcctagtacttaactttcttctgaaaattccctcatctataaatttgaggatgatgataattgcaaagatgccagggaaatttataatcattattgaactaatccttttgaaaatataaagcagcattaaatgttacgattactaatctttttaattaaagtggcaaatgtgtccaaaaatctgtaactaagttcattactctcatttatgcagctaaacttaagttctaccaaatgtatttttaagttgattaaaaatatggttggcagcatttataaatacccattattaacatgctatactggtaaatatatttctgctcttatgactagagagtgttgtactttagtaaaaaacttatacctcaataattatctgctctcctatttttattttatttgcaatagatatgtatttattcatgcatttgtattcttattgaatgaaggatgttatgtcacttgcattgagtacataggcatccctttcgacaaataaaatcagaatctaaactacagaaccaggttcaagtggggacagaagtacaattttaataaaggtcaaagttttgctagtgtttcacttaaaatttatttttaggctttctgaatgttctcttaaagaaaaagacttaatcatatacgtaccttttttgtattgttaacaaggaagaaacatactaatatgaatggtactacatacattatacatgttatacaagagaagaaaattatatattcaagataaacatttttataatcacaatacttcaacataaatgtgttcaatatagtaaagatgcaggttgtataatttgtcaagcaaattctcaattatgtttgaattctatttaaaatcaacattagtattgacaatattcatatttaaggctttttaattatttaaataggttcaagtttgctgtgttcagcattattagttgtaaaagtaggctctggtaccgaaaatatatatttttagctcccttctgtcagtctttccattaaatgctataggctcacagttttacatgcctctcagcacctcactgctcttgttgcctataatattttattagtttaatccttctgaaataatcctggtcattcaaaaccaatacatcaaaatcttctagagtgaacaaaagaaaaaacatttgtgaagattaaaagaaaaaggagacttctcagatatattaactttaaagactatatctcacaattatgtaatatatttgttgctttatctaattagatttgcatttcttatatataccatgcatataaaaatatatttgatacaaattataatacaaggcattcaaaaatagaccattataataacagaacattttctaaagggattttaaaactgtaagccaaatgccttaatctaatactacttctaaaatgtattctaaagaaataatcttgcatgtgtggttagacttaattacagaaatattcattgtaacctttctttagaagtgaatattgaaaactgaaataaatctaaatgtccaactttataattgctagttatggaatactaacaaatgaaatccatgcttttaaaatagcatttagtgaagcaaatatatgttcaaaatacatataaaggaaaaactggtatgttattaaagaagatagaataaaatttattttgagagtgtatgctaataagacagttttgatatttaggaaaattaaaatgttaggtaatattttaaataaaaaaataaattttctgtttgctgagattatacgtattttaaacaatttttaatgtacgctatagacactgaacatgtataatttatgtatcaagaaaaaaatcaataagttcaatttttaaaatcaaaattaaaagtcacataatagatcagagaagataaagatgaattacacttttttctttatctaacaaaagagagtgcatggtttatggagacagacaatttttttctctggttttaactctaagatataaaaggaatctattgtatacatctggaaataagaggtatttaatacctaatgtatattaagattactgttttagctttttttttacaatatagaagtactgtgtgatgacttaccttatcaaccattgaaagagccattttcaaagattgattaaaatcgaagagttccataagcaattttcactaaagcattgaaaactattatccaagattaagaaaatacttttctagggatccctcatatctagggatctaatgaccattagatccaccttgtataatggaattaggacaacccaaagatctggatgattgaattgtcatttggggattattaccatcatacagctcagtttatggcaatttctatacatgtgtttagtattaattgaaggaaactcataggaattagatgccagacatgaagactatatacatatcttcagagcgcttgtgtcctaaactgaaaagtgtgttttaagagtctgggatatgaaaccaccttttctctattcttgtcaaatccatgtcattctagctactgacataatttatgcaatataaatacaaataatgataagcaaagttatatgaaaatatgtttccagtatataggtagttttaaccattctttttagaagaaatgtgtgtgtgtgtaaatgtcttaattgttaaaatgattaagtcattcacaggtttgttaaagtttttccatgtagctggagtgataataatttgtattacattttagagtggtttgatgcaaataaataagaaccaactcaaaatgttattgaggttaaactccaagaagacaaaaggaaaactaaaataacaaattaaactataattaaaacatttcaactaagaaaaaagtaaaaagttaagctatctcagacaatgttcgagattgaagcttgttaattgcaatggaaaaactgctaattaccacaaatagtaatttagaggcataaatattacacaggtgtggctgcaggaagttgatattaatcaaacacatttggcattttcaatgttgcaaaaattacaattgtaaacaccttccatacaatcaaatgttatgtgaattttaaatgagtctcaataaattatactgcataaaaacaggatttttactatggatcataattgttaatgtcttccgtactcaaggttgaaatataaatcaattcactctattatttggtttggaagtttaagaggacaattcacatttcctttgatacactctaccagtgtcactggactggtgatgtgacaagaaaggtcttctgtagaattgaattgcaataatatggagattataacaaaattatatatgtacctaagaatattgactttaaaagccttcttcagattgcaacattgatttccagatctgttgggaactagctgccttacttaatgtaacagtcttggcaatggaataatcatatatatcacctatggataattaatttttaatcattgaaattcactgaaatatgttgaacatgaaaatcatacaaatataattttgtatgctgtttcagattctttggaattttattctaagcatcaatcaagatggtatagtacgagaaaggtagaacatgtaattataaattcaggattcaggaagtttatttttctcttctttttaattctctcaaaatgatcttgattcctgcaaagtgttagtatatctggtaagtaagagtctatttcttttaaacttcatctgtattaaccagctttatatgaccaaaatgtcccccaaatttaaatctttgcacagtaaggccttatatgtacacctggcctcatttcaaaagactaaagcagttgttctcaaattcagctgcacattaatataaactggaaaactgtttaagctcctgatgacaaagccacatgtgagactaatttatgctgaatcactgggccaaggacccaggtatcagcattttttaaaactatagaggaataaccagggttgagaaccactgcacaaaatggtaaatgcaacttttatttaagttattttttttaaataaataatggttgaattgatactgatcttagtaccaagtcatggcaattttttcagacttagagaattcatcctggcattgagattattaaagaacctagaaatccaagtgtttttgtttatatttttcctgtaaatattagagtatgctagtgctcatccttatttgataattttggaaaatatattaaacatttgagattgaatatcaaaaatctctaaaagaattttagaaataccattcttctatgaaataagtaagctcaatcaagatacatattatagtgcccatttaagaaagtctaataataatgcttgcactgcttaaagattaggttgataaattaattattgttaatcctacttacataatcaacggacacctagggatggagtcttaagtacagacacagaagttgaatacttttaagaacttttaaatttacatccgggttaaattttactttaaaattatgttgagtggttgtgattagtacatgtgtgattagaaccgtctttctcaggttattatatcaccatatagacacaggaaaaataatagaattaaaaataaagcaagaaaaataatgtgacactttattggcttcagataattattttgagatcctaatcctaccaaaacattctgcttttcttaacttgatcctacttttgtttgtttgttttaataaaggatgaaccaatatcctgagaaattttcaaatagggctggttataacactaagaacctagatctcactatgttttagaaaaattgtaaagtatttcaaataatcagtaaagtttcagctctgcaccattgtgtctttgcaatatggggaaagtcacttcacttctctccctctctcgtttttggcacatgtaaggcagagaaaataatatctactccagctatcccacatgttattataaaatataataagagatagaaaatcactttataatgttcaaagtattataaaagtaagccatgattatatgtgggattaacagcagtttgttatttaccatttaatgtatttctaatgtacatttttgccatatttaaaaatgtttacatttcgatttttaagtgaaagagtaacggtatgacattatgccatgttatatctgatgccattatgtcaaacaaacaaacaaaagcattttaaactatttggaatcttaccaaaataaatcttataactatgataatacaggtttttgaggatttcgtttgtacgcaaaaacagaggcaataaaggcaaaaatagataaacaggattacttagaattataaaccttgtgcagagcaaaggaaacaggagggtggagggtggagaggcaacctacaaactgggagaaaatatttgcaaaccttatatttcaatgtactagtgactatcaccctaataactagtcatgggagcactgtcatgcatttggtatgtttttgttttcgggatgctgccacttaccacggcgggagcctgatccctgcggaatcgactgtagctggacttatcttgaatattctgagccaacataccaaaccataaggtgctaattcattcatgcttgaaggccataataatcaatacacattcacgcacacatgtacgttcacgcacacgtacgttctcacacacccgtacgttcacacacacacgtacgttcacgcagtatttaaaggagtgcttccgattaaatccgcagatctgccctccccccatctctgagtttattgttaaattaggtaagccagcccccaaaaacaagatacttaaattgaacctagtcagagccctaaaaatcataatttaaccatgaacactccaaccctagcccctcgattaacgtaattttctaaaaaatcctaacattctccaaccaaataaaatctcctatttcgatgctaactaaatctctgtcctaatacttatataatacttcaggtatcccgctctgaaaagcttgtatcccagatattatagtcctaaatcaaatataacttcaactacaaatggcccctcagcgaaaacctctgctagttcaacttttttaaaggccctaaacttccaggactgtaaaggaccactttagatttatacctaacaagatcctaccccctgacatccccctagtatttcaaaataccactcaaatgtttttcacccagttaatgtagcttaattatttaaagcaaggcactgaaaatgcctagatgggtccgcacaacccggtaaacatagaagtttggtcctggcctgttttttgaattcttagtaaaaaattacacatgcaagcatccccgccccagtgagaatgccctccagatcacctggatcgaagggagcaggtatcaagcacgcataaacgcagctcaaaacactttgctcaaccacacccccatgggaaaaagcagtgataaattttaagtaataagtgaaagtatgactaaactatactaatatttatggttggtaaattttgtgccagccacagcggccatacgataaacccaagctaataaaactcggcataaagagtgtttaaggtctacattcagtaaagctaagctccatctaagtggtaaaaaactccagctgaaataaaacgattacgctccttgaggataagatgcatattgtaacaattttctatatcctccacaatgttttgcagattcaataactatttaatgaattgagttaaatttgcctatactcttacgctcataaataaccttctaattctcaattcctctaaaacatagaaaaaattgccaatataaaaaagcaagaaagaagatattaaccattttgtcattcaaaatatgactcattcttatacaactacctttgtcagcattcttgccattggactatctagactttgacgctggtatatcatggcttgttgttagagaaggtaaagtttggaaaacagaagcagttatgtaaagcaatcttagaaaatccttgagtttcccttagaattttgtgtcttctacatgttttctgtttcacatagattcagtttgcagagttatgtcataatttcatgagcgtatctgtcagagagccctttgaaggcctatttaatccaactaagaccattttttattgttttaataccattgaacttgttctgataattgaggaaaaagagaaagacattccatataatacaccagatgcctaagtgctttggatagtcataagccttttctcctatagcttcctatttagaaatgcctgctcttcagagttttcttaagctttccaacttgctccttccattttataagaataatagtctatttaggaagactattatcaaataaaaatcagaatgatcagtggacacctattttagccttgggatttatatcacaattccctaagactttatatttccagaaaagaaattcaaactaaaggtcacaattactattattatagtaatactgataagatgtgcattttaactaaaagaagttcccactatttttttttctttctacttttcaataatccttgggaccttagtaggagtgtgcagtagtcttgtggtgtatttttagtttaaaagtctgagcatacctaattaccacttggtagatattgttcaaactcacttttgaatccaagtgtttttaccctcatagaattttttttaaaacgagtatttgcttgtttctattatactgtaactattggagctactaggaggccttttaaatttcaccaacaagtaggcagaatggagactaactgaagggttgatgggcttaaagaaaataaataacctaacaaaaccaccaggctaatggcaaaaccaacattaggaaccaagtcactttacttgggattagtggataccaaaatgtgctttctcggaagcagcactttacaaggaaatacggaaatccacctttgttgtccttcagctaaagggaataaaatcatgtactttctataattttaaccctgttataacagatgctacatgaactcaagtggaactctgactgccttgagagctgaataaaatgcatcccaccatccgttgcagccgcatcaaggtattaaaaagagagacagaaggaagaggtgagagaggcacaagttcaacagtgtgaggcagtcagacacaatgggagggagaaagaaataaatgtctgaatgtcattgaaagaagagacaatgaaggcatatgtaagagtcctgctaaagctatggaacctcaggagcctatttgtaagaactacaatttagaatagggaacttgcaatacaatgcctgacctttatttcctttcctgcctcgaacttgtgaaaacctttgattgacttttctatgaacatgaattactgttacaatatttagttgaacaatatgaatttctcaaagcagtaatacagcgctacagcatagcttaacattgtttaagtaatatggtttgcttatatttaagtcatttctaagggacccatgcaaacacagtcaggagatctatttctgatgtatttccaaggctagaaacaaaaaaatgctgttaatgcataaacagtcaaaaaaccatgcactgtggttttacagggacctctatttctaaagatgattgttgcatgagggtctctgcctttatgaagggaaatgtgtagattttaactagatctgtttgtgttttgaaaaagaaaatcatgtttctgcactaaaaaataaattcctaatcaaacctttaaagttaacatttagaacagggacagaaacttctgttgtttcctaagtgttttgctgttgttcctgtttagttttaaatcattttttagaagttttattgaggtataaaaaaattgtacacctttcatatattcacctggatgagtttggaccaatatcatcatcacaaccaaggtactgaacatacttattcacctccaaaaattttcttgtgttcttttttaatggtggtagtatatttttaagaattcagcctttgagcagggtacgaaggaccttcaacaacaaatgcaaaagtaaatgagctaagttcatataaagggttagctctcagtgagatattcaagttatgatcatatcctcaagaggcttgtaaactgactgtgggtttccagtttggttattcacagataggccttcatttgctcattcacctattcattcatatagccactcattcattctcaagaagaggtatttgtccatatctcaccatgtggatgagcagatggtcagttctcacttcttttgccattaagtgtgctcaccgttgagctccaggatgatattttctctcactttgcgtcattaccaaagtggctatcaagattccctcccctaccttctttttcttttttcaatgtttaagagctggagttaatttcttgactcctttggtaacacatgccgatatataccactcaaggcctgttggattaaactgttaaatttgtcatctagctaatgttttctcagaaccagacaaattaaacagagtcaattgttgaaattatttcaaaagataaacaatcatagaatggaaataaactacagaaagtagggaacaggagtaactaagtctcctagaaaacatttgcagcagatgttaagtatccagtctcgttgttataaatgaatttcaaagaatctcatgaggagcagctttacaaaattttactgcactaacaaatggcagccaatctctgtagtaaacacaaaatactgtaacatcctttgtatctccttaaattaagccaatttctgcttacacagaaaatctgtctgtggaaaacactgcttagaatttgaaagcacattaatctggaagccacaacagaagtgtgcttcagaaaacttcttaatatttttcttgtgagttattctctttacgcttttcacattacaatattaccaagttatcataatgtattttctgcactcccagagcaagataagactctagtagttgctgggaactatgcattgtctaaatatgggttcacattctctcacagtgattctggaatcatacacacaaatgagatcactgctgtcagatcactgggattaagactcaacctctctactcactggccatgtaaatatagatacagtactcagatcctctgaggcttagctaattatcagttgatttggtctacacttaccacattaattatttgaaaggattcgttgatataacatgtgctgacaaccataatcattattaaggcaatgtttaccaatatgtgactttaaaacagatactactattagataacaattcacactatacattcaatatttaaacaacagaattataattttgtgaagcaaattttgtactcaaacagaaaatccaattctataattattttctgcaatattgggtcatagaaccaacaaagaatatatgactggcttagacgtatgtaattacttatgcaattagtaataaaattcttcactcattcctagatttgaatccctgatgctctgcgtagcagctgtatagtcttggacaagttgcttaatctgtctgtacctcgatttcctcatttgtacttcaattttcttatgtggtaaatataaaattacttaactcagagctatgaggtcagttttatttgagagaatccagaataaaatacttagcacacatttcctaccattcagcatgcataatacgtactcaaggaaattttagatctctgtacatgattaatatattaaatcctcaaaccgactataatgtctgaaaatgcatgtctttatgtcactgtacctctcactgcacttggcacagtgttgtgaatatatttgtcatttgtatgttctttctaccatacaattctgccactccaattagcatattgtgttggaaaacaattgggtgcttgccttatgttttactaaatttatacggaactacgttgacacttccttgcccttcagatgctggcactcactggttgctttctagttctcaggagtctctgtgtgactctgtcctttacacttgccctgcaacatcaccctcagccctagacaaagccaacatcatttttaaaaacctgcaaatatgtctgcaattcactgtatgaatattctcattctatcaaaaccctgacctcactaactcaatggagcaatacaggatgagaaagtagtttatatgaaagtcatagaaagcttgctttgtttattcatccaaacgtatgtttttaaaggacgaggcttttatctgaaacaaataaaattataatttgaaatttcaaataatgtgactaatatattatgaattcatttccaaatatagaaataattaaaacacttggggtatagaaaaatgagtgctgtatctattcttttcttatattaattttaccccagctgccagaatttagttttttgtttttgttttttttctttttctttttttgagaccgagtctcgctctgtcgcccaggctggagtgcagtggcgctatctctccgctcactgcaagctccgcctcccgggttcacaccattctcctgcctcagcctcccgagcagctgggaccacaggcgcctgctaccacgcccggctaattattattattattattttttttttttttttgagacggagtctagctctttcgcccaggccggagtgcagtggcgccatctccgctcactgcaagcttcgcctcccgggttcacgccattctcctgcctcggcctccctagtagctgggactataggcgcccgccaccgcgcccggctaattttttgtgtgtgtttttagtagagacggggtttcaccgtgttcgccaggatggtctcgatctcctgacctcgtgatccgcccgcctcggcctcccaaagtgctgggattacaggcatgagccaccgcgcctagcgcaaagatgtattttactaataccacagaggtataatctgctgctacttcttgatcaggagtaaacaagtttacttcacagcagttgatctaattttcttccccattcattcaatggtattttttttattgttatagaacatactgaattggataataagtccttttctttttcttttttcagaaatggtttctactctgttgctgaggctggagtgcagtggcattatctcgactcactgcagcctctgcctcctgggctcaagaaatccttcgacctcagcctcccgagtagctgggactacaggtgagcaccaccatgtccacctatataatttttgtattttttttttttttttgtagagacagggtttcactgtgttgcctaggttggtctcaatctcctgggttcacaccatcctcctccctcatcatcccaaaattctgggattacaggtgtaagccactgcacccagctgagaaggctttttattataggttgttcttattgttttatttagttggtttacttgttggttttcaaggtaagtttgacatataaggtggtataatgtttaaaggtcaagttatagagatagctagattgaagttcaaatccagagccaagttacttagactctctaaggacttgttttttcccttataaaattaaaataaagtggatagccacttcataggtttgtaataagaattaatatgatcatgatgtcacagagttgcaaagagatactgaaacttggctctgccaaaaaatattagctattgccattatgattgttctccttaatacctaaggcatttgctgacagtcaggttactcatcatgtccttccaggaaaaaaactttaagaatgttgaaaacttaggaactacttttaaaatttaattttcagacctgacataacacagctgaggaagagaggtggtagctgattggggatagatgtagagatcattaatggtataagagtgtgagaatgtgaagcaggataggatatgatattactcatacagatcacaaatacatgtcaaaattatatttatcattcatttaagtaaaattcaacattgttttcttcaaagaagaaattgcgcatttcactctatctatttaactctggaaaattttacaaattgagcatgccattttttagtatgaattcctttatttcagctgccctgctaactttggcatgatgagcagagaaaaaataaacagaatgattagttctgaaatatgaaaaagtgtctaagaaaaggagtagtcttgagaagtagggaacaggatgaagtcactaggggacagaagggtaggagggagtgggaccagacaaacactgagctctgcatgcacacgtaacagtctaaaatagtcatccagcacgcagactctaagtcaagataaccaagatgaattgccaacttctccacaagcaatatgactttgggtaaggtatttgagttttctgtgtcttagtttcttcaactgataaataaaaatgatggtcatatctacttcataaaattgtgataattgattaatacatgtaatgaatagcgtttggcatttagcttaataataagacttttcattaaaatattagctacttttgttagctagcaactctcagttttgcctaaagctgaccccatatctagggtgaggttttgaaagaaattcaacaccatcagaagtaggtctggaagttataaaggaaagcttaaagaaacagaaatatgtgcaacacctatttacaaagaatccattgggaaaaccccattgagcccagggagatggcacatgtcccctttggttatggaattcagttccctgacggtcagtatactgtctttgttcccaaggcaaactttttaataattgtgatcccactcaatagtcatgttcacttactttatgggtacatttgtggcatattttaaaatgtgaagttgagtgcatttcacctgaaaaccaaaggcatgtaatgacaacatgctatagaggaaaaattattgatttgtgtaaataggcagatcttgtttgtattctagctccatcacttactaattttgtgatatgggcaatttatatcctatctgagcctgtgtttcctctacaatatgaggtaatttctactttgaagtattgttatgagggttaaatataaattactttctggtttatgatgttggtatatactacttctatgcacaaccgttatttttatgaataagattttaacagtaagccacagaaaatataatgtaagactgattcttagaatctatcaaaacaggttgtaaaaatgacttaaacatctagcatggcagtgactaacattttgaaaagcttaatttttccattaagaactatagcccaacacagtgtctgtgcttcagtgttcctcttatcaggaaggataatatgtgtgatgcatggactaactctaatgaaaatttttattcttaagacacaaaatatttcccagcacagtacataaggtctttgtgcttatgtcagcattggagataaatttctgggaaagaagtagagaaactgctcatttctatagacatcaaaacaccaaagtagccgggcgcggtcactcatgcctgtaatcccagcactttgggaggccgaggcgggcagatcacctgaggtcaggagttcaagaccagcctcaacatggagaaaccccgtctctactaaaagcacaaaaaattagccgggcatggtggtgcatgcctgtaatcccagctactcgggaggctgaggcagaagaattgcttgaacctgggaggtggaggttgcagtgagccgagatcgtgccattgcactccagcctgggcaacaagagcaaaactctgtctcaaaaaacaaaacaaaaaaaacaaccaaagtaaaagtgaaaataaaggtacacagcagactttttctttttaaatacctaaactgaaaagtatacctgtcaagaaacatccaactcatgaattactttaaatatgtttttaaaacagcgtgcttgttttataacaatagattcatgctagttatctgatattccccagtggttgctttgtggagctcagtgtcatccttggagaacatgggcaataaaaagcatttcttctgcaccagtaagacaaaaacaaactgactacttctcacataaaccttggagggcttccctcagtggggttagtgatcagcaaatcatgtcaaataaccccttttgttatttttgacataatagtgttcctagcagacagtactcaagaattcccagattcttagctgtaacataaatttaatatactctcttttattaaaagtcaagctgtttattcacagtagctcttaggtctacgtttcattttacacatatatgtggatgtaatagctttttccttagaacttttaaaaaatagaattcagtaaaagtcctatatttgtattttctatgtgtcaagaacagataagcatcattaatgtgaaccaaatttcaattgaggagctgaaattaggaagaattgaaaaacacctgaaataaatcttcaagtaataaaggggaaagtttactttagaattagtgtatcaaaaatgagaaaattggctgggcgcagtggctcacgcctgtaatcccagcactttgggaggctgaggcatgcagatcacctgaggtcaggagttcaagacctgcctggccaacatggtgaaaccctgtctccactaaaaatacaaaaattagccgggcatggttgtacatgcctgtggtcccagctactcgggaggctgaggcaggagaaccgcttgaaccccagaggcagaggttgcagtgagccgagatcacaccactgcactcgaaactcggtgacagagcgagactccataaaaatcaatcaatcaatcaatcaatcaatcaataaaactttttaaaaagtcattgcattatttttaaaaaattaatagtttcaaaatgtatacatgtaaaatctaactgggaatactttgtatctacttgtagcacaagattaaatttattttcaattactaggagatttgcacaatagagtatatatttactttaatctgtatgactaaaagcctcattgtcaatgtgactatgtcatcattatcacattcatgaatctcctgattataacctgcacagatggtctacctacagggctctgggataagaaacttgctgtctgtctacagaggaagccgttttcacttccagatagttctgaatatttgcaagtacttgctgatttagagtcaaattatgtcttgctgtaacatccatgttactgaacttacatttgagataaaccaagattagactaaaccatgccttcaaatgacactctcaaaaatgtgatgcaatttatgtgccaaaactatcctatcttgccattttcctccattttttaggaaaagcatggtcctagttttgttagccacagttgacactactattttaaatcactatgtcatttgtatatcctacatttgaacactctttagtgtcttcaagttaaaatatgcataaaaactgcacgtccaggatactctacctggagaaaaacatagctctcattaaccttgtccagacattaaacttataagagaaaaatcattattttcctgtaaccaaattattccgctaaatttgtttttaggcaggattaataaacctttactgtaaagggaaagaggctaagattttaggttttgtgggccatataatctctatacaactgttcaactctgctgttgcagtgagaaagcatttatagacaatacgcaaatgaatgagtgtgtccatgctgcaataaaatttaatttattgcagtctattggctggatatggcctgcaggccataatttgccaacccttggttgacagtatagctagctaaacactgcttgttgtagtaaaatcttgctttttaaaacgtatgtctctcatcctagtattgtcattacgtgtgtgtggtttattgttaaatatgtaatatttaagggtctttcctatttagttttattaactaaaagctgtttcataattgtaatgcacagacatctatataggtttttattttatcattcaacctattagctaatccttagagttgtttcatttttcatgtgtttgacagatgaacatgtctaaaacactgatgataatgttaccagaatataaacaaaaatgaaattttcaggttaaaaccattttgttagtaatatgtaagtatatcaattaaccattaaataatttaccaaattattccattacctaatccatattgctccttcttgtccacaagaatatagtaaggtacatgtcaaatacatacctctgactttagtgggcatttaatgtattattagaggatcctgatatctgtctttcttaaagaaattaaactcatccctagtgattatactttcttcatctaacactataatattaataacatttgaaaaaataatgtctaataattaacactagatttagagtatttttagacaattttctaaaattatctgaaaaatttgaccagaatcattgtaaaattcacatctgagcttatgaaagcccactttattccactctaaaagaacaaaattttgtacctttaattttatcttttaaaatgttttaacataaaggtagtgggagacgttactaaaggaagcttaggtagtaacgtatttgtcgtctcagttaacacaaagaccatagatggggcagatctgcaggatgcaaaaactttcctttttctcacctcatagtagtcatatggctactgcaattctctggtttcatgtgcttacaaaatgtcctttagttaaaaataaaaagaaagagaaagagaaagacaaagaaagaaaaagaaagagaaagaagaagaaaagagaaaaaataatttcttcatgtgtctatttaaattaacaaagacgtgaattgtcccagacctccctgtgatgagtaacttcatgtgtcagttttactgggctaagggttgcccacatggctgataaaacattatttctgagtatgtctgtgtttccagagaaattagcatttgaataggtagactgagtgaagaggatcatcctcaccaatatctatgggcatccttcaatctattcagagcccaaataaaacaaaaaggcagaggaagggcgaatttaatctgtcttcttgagctgggacatccatcttctcttatcctctgatattggaacacctggttctcagacttttgggcttaggttgaactatatcactaactttcctgggcctccatcatgcaggcaggagattgtggaatttctcagtctcgacatccttgtgagccaattcctcccaagaattatcttcttctagctatctctgtctctttctctatctatttcatctgtaaaagtatctgtatctctgtgtcatctatatctgtatcatctgtatctttatctcatctgtctctatctctatctctacctctatgtctacatctgtcttagttatctatctcatttatggttctgtttctctggagaaccttaactaatatagtccttatcttacaactcacttgccagcttaccatgattataaccaagttgatcacttcaaaagaatactaaataatatatattgtttacactaagagatagctagctactctcctcaagctgaatctggcccccacctcacttagtagagcaagcaaactaaatgtagattatacattttttactcattgaaaaaacccaaataataacttatgacatgctaaaatttaaattttgatatacaaataaaattttattagaacacaattatatttattcatttacatttacattatttgtctatggctacttttacactaatgcagcagagtttgttagttgagacagaaacaggccaataaagaccaacatttttacaatatgaccctttaaaaaaaaatggacccttggtttagactgatcaataatcctatgggaggattttaatgattttcatctgtaaccaaccaagcacattttttttcttggctaggataaatttagaacatctatgtccttccctaaaatagccccacatacttgaaagtctgattctctcataactatatttttttctctgctgttaaaatttgaactcattctcttcagaaataaagaaagtaacaaaatagaaactaagcagtcccatttttattttgccatttatgagggcctatgccacctagcggtgatttagtatgtatttaacaaccagttcactgagaaaaactgctgtatttttagtttgcttaatttagtggtgttgaatatttcctctatgaccaattttggcttacgaatatgatttctttgaatgcaaagttgggaggagatgagcactgtgtgctcctatgaggagttccatctggctcaaacataaacactattaacatcactttgctctagacatgtgattctctttcataatgcttcttgcattaactgcaatataaaagttacaatccttattatttttgaaaaactcaatttgtataggactcttgataatattttaatatgtatacattttataataatttttattgatattttttcttcttttatacttttttttgtttatttatatagtttgttttcacattaaatgggagaaatactgacattgttcaattcacacccagggaaattctgtgtgaatgatatcatattatatttcttttaatgctctaaacaatgttgtgaggtaagtgttatctctgatttgcatatgaagaaacatattccgagattaaaaaattgcccagtttcacacaaggaataaattggagcacaggagttctatatagatagacctgtatgacttcacagagtgaaatggacagataaacaattcactttccaggagaaatcacaggacaatggatatcagaagaaatgatgggaccagggtaatattggatgttttgtatataaaaaactaatgtgggcaacaaaaaagcatataaagtcactgaagcaaaatatatataatatatattgcgaaatctaaaagaaaatatgctattggtaggccatggctacattataaaaaacatttcatttcacataaagtatgaatactacactatgactatgagttaatattaaaatttgaccacataggaaataggagaaaaaagtaacaacactgtggaaagcaaagaaaatgactgcaagatgaagctatcaccaccatctcgtggccacatacggacttcctcagaagcttagatgaataaagggaagagactggagttattaaaatttgtaaactcagagtaaaagccttcctgagctgaggctagacctctgagggagagatatgttccaactgctgctgttacctctgaagaggcactttctggggctctgaaaaaattggtaaactgaaacaattactgctcctagggcaaggggatgttcttgggagaatatcagcaaggacggcaaacaaacaggaaaaggagatctattcttccattctcttgcctatgtttctctagtacctcccaatagcagaacgtagcaggatcccacttgaaggaacttggaaaacgtagcttgctgatccccatcacggcatcatagcaaatttatttcagagaaatgtggctaaagatcaagattattagtaaatcaatttttttacctaatttttaatctgtattgatttcttataacataaatatctgtggttacagagacctcagtattttctttttcttctgtagcagcatttcaatcttttttgaagttctacctctctttcacttctagttcacaccatgtgagaacaatggacctaatcatcatgggcagtggtcataatatgtctcaacctgcccaaaataaagatgctaccccattaaccatatgttttattttgtaatacgatcatgatccaacctagtctaatgagaaacttaactagaaattttgttggaattattgaggaaaacagtgttcattttctgaaaaagtagcttagctagtaagatataagctcagtgctactagtggccatcttgatgtggaacaatactgagaatatttcttcaggtaatcctacaagaaatgtgtgcaaaacagaaaagaggaagttacaatgagaaatttcttacgtactatattcagtagagcctcagggtagctctaaatctagatacttaataagaatactactgataataaataatactcatatagcaaatactatgtgctaagcattctttcatgtactttataagattaatatatctaatacaaggactgtatgagatagatattattgtccagttttattatgtcctgcaaataaaatgccctgacaaattatattctctcaatcatctttcctttgtttgcaatcaacattttatatgtattcacttattatgtatcactcctttgattcctcaaaatttatttagggctatataaatattttgctactactggaattagcaaaactttaaggttaaattttcaaacatgttattgccctcatcatactgtagcaagaattagtaatcaatgatacataaaccctatttatttatccgaattattccatttcacatcctcacaaaggacactattctgtcaccatttaacccttgtccccaaaatctcctcataaatgcagtttcaaaaacagcaaatagataaattggactttattaaaattaaatttttttttttggtgaaatggagtcttgctctgttgcccaggctggagtcagtggtgccatcttggttcactgcaacctctgcctcctgggttcaagcgattctcctgtctcagtctcccaagtagctgggactacaggcacgcaccaccacgcccggctaatttttgtattattagaagagatggggtttcaccatattggccaggctggtctcgaactcctgacctcgtgatctgcccaccgtggcctcccaacgtgctgggattacaggcatcagccactgcgcctggcccttaaaattaaaaaaatttttttaaagtttttatttttttgagacagggtctcatcatgttgcccaggctggagtacagtggcgccatcatggctcactgcagtttcaacctctctagactcgagcggtcctcccacctcagccttctgagtagctgggactgtaggcatgtgccaccacatcccagtaagttttgtattttttgtattataggaattggggccaggcacagtgctcactcctgtaatcccaacactttgggaggccaaagtagatggatcacttgaggtcaggagttcgagaccagtctggccaacatggtgaaatcccctctctactacaaatacaaaaattagctgggcatggtggcacgcgcctgtaatcccaactacttgagaggctgaggcacgagaatctcttgagtctgggaggtggaggttgtagtgagctgagaccatgccactgcaccccagcctggttgacagggcaagtctgtctcaaaaaaaaaaaaaaaaagaaagaaagaagtggggtttcaccatgttgcctagactggtcttgaattcctgggctcaagcaacctgcctgccttggcctcccaaagtgctgggattacaggtgtgagccactgcacctggccaaaattaaaaacttctatgtttcaaaggacatcattaagaaagtgaaaagacaacctacagaatgggattaaatatttgcaaattgtgtatctgttaagggtctagtatttagaatatgtaaagaactatcacagctccataagaaaaaagcaaataatccaattgaaacaatgggcaggccaggtgtggtggctcacgcctgtaatcccagcactttgggaggccaaggtgggcggatcacgaggtcaggagatcgagaccatcctggctaacatggtgaaaccccgtctctactaaaaatagaaaaaaattagctgggtgtagtggcgggtgcctgtagtcccagctactcgggaggctgaggcaggagaatggtttaaacccaggaggctgcagttgcagtgagtggagatcgcaccactgcactccagcctgggcgacagagcgagactccgtctcaaaaaaaaaaaaagggcaaagaatttgaagagatatttctccaaagaaaatgtgcaaatggccaaataaacacatgaaatacacacatgaaaaggtgttgaaatcattattcattagggaaatgcaaataaaaatcacagtgaggccaggtgtggtggctcattgcctataatcccagcactttgagagactgagtcaggaagatcacttgagcccagaagttagagaccagcctgggcaacatagggagataggcgtggtttgtgcctgtagttccagctagtcgagaagctgaggtgggaggatctgcttgagcctgtgccgtcgaggctgcagtgagcagtgatggtgccactgcactccagcctgggcggcagagcaagaccctgtctctaaaataataatgataataataataataatagagataccaattcacacccactagaatgactataataacttaaaaaaaatctcaaaaaaaaaaaaaacccaaaaaacaaaaccccaacaactgttggtgaggatgtggagaaatgggaaccctataagggttccttacttatagagatgtaaaatgatacagatgctatgggaaacagtctggcagttcctcaaaaagttaaacatacagttgccatatgacacagcagttccattcctaggtcatcccaagagaaatgacaacatatgtccatacaaatacttgtacatgagtgttaatagcaacaatattcataattgtaaaagagtgggaacaacctaaatgtagatcagctgatgaatggataaacaatacgtggtccagctgggtgtggtggcacacacctgaaatcccagcgctttggaaggccgaggcaggtggatcacctgaggttggaagtttaagaccagcctgaccaacatggagaaaccccatctctactaaaaatacaaaattagccgaacatggtggcttatgcctgtaattccagctacttgggaggctgaggcaggagaatcgcttgaacctgggaggtagaggttgcagtgagccgagatcatgccattgcactccagcctggtcaataagagcgaaactttgtctcaaaaaacaaaacaaaacaaaaacaaaaaccagtatgtggtccatccatacaatggagtattattcagccacaagaaggagtgaagtacagattcatgctgcaacatggataaaccttaaaaacattatgctgagtgaaagaagccacgaaagatcacatatggtatgatcccacttatatgaaatgtttagaacaggaaatccatagagatagaaaagagatcaatggtttctaggagatggggagggaggcaattgggaatgactgttaataggtatggggttctttttaggtgatagaaatgttctggaattagtgtagatggttgcaaaatgtgaatacgctaaaactactgaattgtatactttgaaatggtaaattgtatgctatgtgaattttatctcaattaaaaaaaagtataggccgagtgcagtggctgaagcctgtaatcccaggctttgggaggccgaggcgagtggatcacttgaggccaggagttcgagaacagcctggccaacatggtgaaaacccatctctattaaaaaaacaaaaattggctgggcgtgttggtacatgcctgtcatcccagctactggggaggctgaggcacgagaattatttgaatccaggaggtagaggttgcagtgagccaaggtcacaccactgccctccagcctggtcaacagaacgagactgtcttgaaaaaaaaaagataaattatggtatttgctttggaattaaataattagtaacctttagtaaggtttggtaaaggtttagtaacctttagttaacccagttaacttctgtgtcttatgcttgtctttgtactgaagtagttgaatgccactgacccacagaatgagttgccagagaattggagcaacattctgttgtgggaaagagaatactctgttctaccttaaaattagattaccagcatatcaattgaagggttttaaatagtgagtgatgtgtttcaatttatatttatattatatttacacttgatcttagccaaaagtctgagtagtgattttatattatatttataaagatcactttagctttctcctggagactggattggtagggacaaggtgacattggtgaacttggttagaaagtcagtcaagcccgtgtgcagtggctcacgcctataatcccagcactttgggaggccaaggcaggtagatcatctgaggttaggagttcgagaccagcctggccgacatggtgaaaccccttatctactaaaaatacaaagattaggcaggcatggtggtgggtgcctgtaatcccagctactcaggagattgaggcaggagaatcacttgaactcgggaggtagaggttgcagtgagccgagactgcgccactgcactccagcctgggcgacagagcaagactcagtctcaaaaaaacaaaaacaaacaaacaaaaaaccagtcagtactctagggaagaaataacaatagctatattatgacatagtagtgagttgaagataactgaatagccaaaatatattttggagatagtttgatatgagaggcgaggaaaagtaagtagtcacgtgtggctctttgtttctggctttaataactccagtagttctggaagagacttagtgggaaaattaaggacattttggataaattgagtttgtccaaatggggtttccaagtggagagttgagtaaatgaagctagagctcaggaaagatgtggaccagagttataagtcatatttatttatttatttattttgagacagagtctcgctctgtcgcccaggctggagtgcagtggtgcgatcttggctcactgcaacctccgcctccggggtcaagtgattctcctacctcagcctccagagtagctggtattacaggcgtgggccaccatgcccagctaatttttgtatttttagtagagacgggggtttcaccatgctggccaggctggtctcgaactcccgactttaggtgatcctcctgcctcggcctcccaaagtgtttggattacaggtgtgagctactgcgcccagcataagtcatatttaaaacaatgggaatgggtaggaacacctagggatagagtatgggaaatagagtagggtccagtatacagctgtgccaaatttcacatgtacaggttagatagtggagtgggtcagttctgttgagaatgccctgaaagcttgaataatgataagcacgtccattttaacatcatgaggtagtggtgacgttgtaagaggagtttcagtgtagtgggttgtcatgggttaaaacgttcagattgtcatgggttaaaacgtgaattggatatgaggaagtggagtgtgcaaagatagttttctgaaagttttacttggaagaggacaaaaaattgagactagacagtttgaggaggatgaaaggtcaaggattctaagctagtgataaaaatttcgtcaacatcaatgaataggtaatgtaaacacgttaatcctgggatggatgtgagaagagcaaagaaaggagtcatgggggaatatcagctctaaaggttgagtagagaaggaaggagtgatctgagaggtggaaggaggagtaggaattatcatagaaactttaagcttcttgagggcttgtgactgtgtcatgttcatcattttatctgaagttcttatcaacaaagtagctttcagtaaatatttattaaatgaagacaaaaattttaagagccatctgcaatgtcaaatgtagcccacagttgaatgaatatgaggaccgggaagtgtcccttgattttggagttaagcagctgattgccaccttctgtagaacagcttcagtggagtctccatgatagaaataaatgccaggttgctgaggactaagcgtggatatttgttgagagtggagacagtaagtgcaaacattcttttcagaaagctttgctctttttgaagctttgctcatagggagatacaagatagtaggtagaggggcaggctgtgtttagatgagagagacttcagcatgtttatatgctaaatggaaaaaggaaaaaggaagggagaagttgaagatgtagaataaaggaggtgtgtgtgaatgattgtacattgtctttgaggttagtgggaatggagtgaagatactgggttgcagtacagatgagaatacagtttccactgaagtaggaataaaggaacaatagatggtgcagatggggaagtgtttgggtggcaagtgagaattctggatatcaacactttatttttttcagtgaaggggggataaggtcatccactgagattatagtggggatgaaatgatgattgtaggggactgaggagaaaaggagaatttcaagaaagcctctgagggaagtgagagggcaagctgagtgggaatacttagaaaaaatggaatcatggatttttcacggctgtggtatatatatttgtatgaatgatttcctccttctctcagggctcagcagcctgggtgagcacacaattgaacagttggattggtcttggcctgggttttatgtgtcagtgtgacagagagggtaaggaggcaagatatttcagtagcgagagtgtttgaagtgatgggccattgagtctaggctgaatagggaacaaatgaaaccagaaggtggctgctgggacatgaagtggttggtgttcaagactggatagtggaaatgaagattgaacgggaggagcagttgctgggtatgacagaatacaggatccagctatggagtgggtttatgaagtagagacaacgttcccaagtctttagtgaacatcagagagtgtcatctgttagaactttagctgcggccgggcaaggtggctcatgcctgtaatcccagcactttgggaggccgaggtgggcagatcacctgaggtcgggagtttgagaccagcctgaccaacattgagaaactccatccctattaaaaatacaaaattagctgggcatggtggtgcatgcctgtaatcccagctactcgggaggctgaggcaggagaatcgcttgaacctgggaggtggaagtttcggtgagccgagattgcaccattgcactccagcctgggcaacaagagtgaaactcagtctcaaacaaaaaagaacttttgctcaaaggcaggtggtagcagataagaggtaaggaaaatttagtgaagaaaaattcagtttttaaaaacgttttaggctgggtgtggtggctcacgcctataatcccagcactttgggaggccgaggtgggcagctggcttgagcccaggagtttgaaaccagcctgggcaacatggcaaaaccttgtttctacaaaaaatacaaaaaattagtcaggtatggtggcatgcacctgtagtcccagctacttgagaggctgaggtgggaggatctcttgagcccaggaagttgaggctgcagtgagctgtgattgtgccactgcgctccaacctgggcaacagagggaaaccctgtctcaaaaaacccaaaaaaaacaaaaaacaacattttattttggtgatggaattctctattgtttcgaagagttttgtttgttttaaagacattaaccagttttctcgagggatattctatgaaaaagtgggttccatcatccaataagtttgagaaactgcaaactctatcccgttggtaattcacaatgaacctcaacttagattaataaaggctctgggaaatgatgttactattaatgatttaacatttattgagcactgtctaaggctctgttctaaggctcccacatgcattattgtttccagtctttacagcaactatctcaatttaagtcacacggctaagctggaatggaagagctgggattcaaatccagaaagacttgctccataggattctcaagcctataaccagtatggaaacaggcttgacattaaatccagcatttccccatcttgtttggttatggaaccttattatcttttagtatttatagagagattagtcagttgtccacggcatggaccctgggaagtgttgcctgagtcagtttacactggtgactacagtcttttaaacagcattgtttcagactataactagttttttctaacttggttctctgttgacaatacttaaatgttatatttatttttctatttgagagccttatattttgacttcaaggcattttctattccctttcacaatgaccttcccaggaatcaaagatattgtcaccaccacacattacatttgagttactaaaacagtttataatccaaatagctatttcactttcctttctctggtctaagattatcttactgtaatttgttttttaaatttagagacagggtcttgctatgttgtccaggccagtctcaaactcctgagtagctgaaaatataggcatgtgtcacctcaaccagtttattgtaaaattttaatgtttagagatcttggagatcatcttttatttttagcagtatttatttagttttgcaggtagagaaaatgacagctgtgtagtgctgtggaaattataataattcatatccaagcttgaatgtcagctccacctctttactatagctgtggccttacaaaacctacttcgtttcttgaaacttgtttcttcctctaaaaagatgaggataatatcttgcagggtggctatgaaaattaagacagttcatacagtatctggcacatggaaagttctcaatgttaattacccatttttttctgtttaaggaaatagtctcaatcctataccatgaatgaattatgaaaatagttggaaaggaaacaacagttttaaatgtaaactgtctcagtcttatgctgacatcagctacatttctggtaaagtgatggtgtcatgatacaggttatattaagagttaaaaccagtttccttctggctttccaactgacataataagcaaaacctgcctgggcaaacatagacctatttattggctcacttattattaatgttaaagtagctttggtgctgacttctcctgttcttgttttaaaatttcactgttgtcatttaaaatctgacagaccttcagaagcttcatagaatgcttaatggtttaaatcgtctctagaacatgtgaagtatcttttccaaagtggttttctccatctgtcagtatgttcaaaatcatgtgtatagggccgggtgccggtggctcacgcctgtaatcccagcactttggaggctgaggcgggtggatcacgagatcaagagatcgagaccatcctggctaacatggagaaaccccatctctactaaaaatataaaaatcagctagccatggtggcacgcacctgtagtcccaactactcgggtagtcccaactacttgggaggctgaggcaggagaatcacttgaacccgggagacggaggttgcagtgagccaagatcgcaccactgcactccagcctgggcaacagtgcaagactctgtctcaaaaaaaaaaaaaatcatgtatataggacagaattgcttatattttcacatttactactggatgcctgtttggttttcatagcaatcaacttttggagtttatgggcagtacttaacatatataacctaagtgtggataattatttaaaataaggctattggaagaaaaatctatagggatttctcagttttcacaacaactccctgagcaaagaaaaaataggttggtttgagttgtatttgatgagatttctaatattctatttgaaatgccccctagtaagcactagtgataggtattaatgagctgaatttgatttccagttccaactctgtcccttgcaacttctgtaaccttgaaggtttctctacgtttcagtttcttcatatgtaaaagagattaccaatatttccctcccaaggctgctgtaacagtgaagtgttgaggtttttatttatttattatttatttatttatttatttatttatttatttatttatttgagacagagtcttgctctgtcgcccaggctggagtgcagtggcatggtctcggctcactgcaagctccgcctcccaggttcatgccattctcctgcctcagcctcccaagtagctgggaatacaggcgcccgccaccacgcccggctgattttttctatttttagtagagatggggtttcaccgtgttagctaggatggtctcgatctcctgacctcgtgatctgcctgcctaggcctcccaaagtgctgggattacaggtgtgaaccactgcacccggctgtgttgaagtttttaatatagccagcacagcatgtggcacatagtaggcacacagccattgcatgtttcttccagacatctcactgcatttttcagtaatattcttttcaagtacgttcttctttctcattccttaacatttaaaagctgtattcaagagagaatattaatgtttgccaagtaaactgaaaatatttcctttgcagcccacacttaagagtgttttaggccgggcgcggtggctcatgtctgtaatcccagcgctttgggaggccgaggtgggcggatcacctgaggtcaggagttcgagaccagcctcagtatggagaaaccctgtctctactaaaaatacaaaattagccgggtgtggtggtgcatacctgtaatcccagctacttgggaggctgaggcaggagaattgcttgaacccgggaggcagaggttgcagtgagctgagattgcgccattgcactccagcctgggcaacaagagcgaaactctgtctcaaaaaaaaaaaaaaaagagtgttttagcaaaaaatgattttatgtatgacataccttggtttaaatcctggctttttaattttaattttttattttttgagacagggtcttactctgtggctgaggctggggtgcagtgatgtgatctctgctcactgcaacctccgcctcccaggctcaggtgattctcccacctgagccacctgagtagctgggagtagaggtgtgctccactatgcctagctaatttttctatttttagtagagacagagtttcaccatgttgcccaggctggtctcaaactcctgggcttaagctatccaccagcctcggcctcacagtgttgggattacagttgagagccaccaagcccggcctgaatcctggcttttgaatgtaatagtgttgtgaccttaggcaagctacttaacctatccctaaagtattatgaggctaaagtgagtaatagtatgtataaaacatctagttcattgtctggtttgtatattcccaaaataaatgttattattttaagtggaaactgttgtttaatttgataattcatataattcatggcttttgagagcctgctctactcaaagcccgttaagagcaggcaggaacattgtgaacgaatgttgggcatattattatgcaagtgactgaatttggccttgcctgtaatcaggttcagcaaaagtggtattttctttctttctttctttcttttttttttttaaattgagacagtctcgtcctgatggccagactggagtgcagtggtgtgatctcggctcactgcatcctctgcctcctaggttcaagcgattcttccacctcagcctcccaaggagctgggatcacaggtatatgtcaccatgcctggctaatttttgtattttttgtagagatggggtttcgccatgttggccaggctggtcttgaactcctgacctccagtgatctgcctgcctcggtctcccaaagttctgggattacaggcgtgagccactgaacctggccaaaagtggtattttctattgcatttgaggtaacagaaattgatgggcttgttattgcatttggcgtggcttttttttttttccatgttgtctttctccactgactgtcaaaaaaaaaaaaaaaaaaaaggctacattcatgagtgccacaagagagatttatgattcccaagtgctacagcagaccaaggtatattttggtatctaaaaagtttttcatcttttgctgatcttgtttattagaaataaagatgttactctcctgtattaaaatttaacacaatattggcaagctaaatttaatcaaatattctgcccattttaaaattcacttcctagcctgtccatccttccttttattttgttgtttgattttgttttattgtatgcttttagcagcctgaagccatggtttttagtttctgtctgtagtgataagtggaaaggagggatgaggaaggggctttactggcccaaccagaaatagaaactaagaacccaggactgtattatctcccttggacacccaacactatataaaattgattcctgccctggcagactaagcattggaaagctggtgctaagagtgttatgagaattcctaacaaatagaaaagctcaaggattgacactatagtaaaagatttcattttgacatgtttataatttacttatcaagttaacaataaggtgtttttatttatttatttttgtttatttttattttatgttttgagacggagtctcgctctgttgcccaggctggagtgcagtggcttgatcttggctcactgcaagctctgcctcccgggttcacgccattctcctgcctcagcctcccgagtagctgggactacaggcacctgccaccacgcttggctaattttttgtatttttagtaaagacggggtttcaccatgttagccaggatggtctcaaactcctgaacttgtgatccacccgccttggcctcccaaagtactgggattacaggcgtgagccactgcacctggcctttttttggtatttttagtagagacggagtttcaccatgttggctaggctggtctcgaattcctgacctcaaggcctgccttggcctcccaaaatgctgagattacaggcatgagtcccagtaagatttttaaagggataccaaaataatcaacatttattttagaaggtgactttcttcaatgagatgtcaatgtctactttctgttatatagtgctatggtttcttttttcttttttttctaagtgagggtctcactctatcacccaggctggagtacagtggcatgatctcgggtcactgcaaccttcacctcccaggttcaagcaattctttcacctcagcctccagggtagctggaactacaggtgtgcatgcctcgctaagttttgcatttttagcagttgttggccaggctggtgtactgtttcttttattgactgagatctatatttacacagcatgaaagtctcagttgcattaagtacattcgcattgttatgcaaccatcaccattatctagttccagaattttgccgtcaccctaatagagcttgtatatatgtccccaccaaatcttatgttgaattgtaattcccagtgtttgaggtggggtctggtgagaggtgtttgcgtcatggggcagatccctcatggcatagtgttgtcctcgcagtagtgagttagttctcacgatctccttactccatccacctgcttctcctaaaactttgaaatacgcttggaattgaaagtgtttagtttagtttgaggatagttatctaaaagtgacatacagggctcctgctttgctcttccttagtaaatttcctattttattacacagtttactaatacagaggacttgagttttgttatttccatggaaaacattattgaatctaaatttaactagagatgtgtagttcagggagggagagtggttttataatatgaatcttggatttgaaatgaacttaaagcaaatgaataaaaattgtttcattaattataatgtctgaaataatgcatgtttttgtgaataaaaattgatataataaagtttaaagtgacaggagtagatataactaattgtatttataatttcttggaagtaaaataacatttttgaaaaatattatacaatgacctcacatacagtgacctcacttaatctatgtgaggctatacacagtggctcatgcctgtaatcccagcactttgggaggctgaggcaggtgattgcttgagcccaggggcttaagaccagcctgggaaacatggtgagaccctgtctctacaaaaaatacaaaaatcagctgggcatggtgaggcgcacctttggtcccaactacttgggatgctgaggcaggaggatcacttgagcccaggaggttgaggcagcagtgagctgtgatcgcaccactgcactccagcctgggtaacagaatgagaccctatctcaaaaaaaagaaaaaagtctatgtggaagacaccgcgttaattgtgttgggtggtttagagatgtttctgtctccttcactgatgaccgtgtgtctctgctgctgtcgctcactggtgattatcaactcaacctcttatatttgttttaacaaatatttatacaccctttgtaaatttgcgtgagataaagtcattatagttaaaaaaaattttttttttttttgagacagaatcttgctccattgactaggctgagtgcaatgacatcatcatggctcacggcagcctgaacctcctgggctcaattgatcctcctgcctcagcctcctgagtagctgaaactacaggtgcatgccaccatgcccagcttgttttttattttttgtaaagacagggtctcactatgttggcaggctggtctctaactcctgggttcaggtgatcctcctgcctcggcctcccaaagtgttaggatttcaggtgtgagccaccatgcctgtcctatgaagtcattacaaagaaataaaattaattggtttcattggcagtattgaatttcaaagcagaaggggtgcttaagagaaataatgcctttggagtgatttctgatgctagatgaaactcatatctcatttaaggtgtccatctgaattttatgtttggatgattgtgaattattccttaaagcttgaagtgaactctggctctctaggataaattaatctttattcctttaatctttattcccttagggatatattaaagggatcaaatttttttttagagtaatgtaaaattaagggacttcttttgttaggtgaatttctcaggttttaagatatcagtatcattgtggacattgactacattgtctactaaattctgtaattttaacttataattctcagtaattggctgggtgcggtggctgacgcctgtaatcctagcactctgggaggccaaggcagcagatcacctgaggtcaggagttggagaccagcctggccaacagggtgaaaccccgtctctactaaaaatacaaaaaaatgagccgggcgtggtggcgggtgcctgtcatcccagctactggggaggctgaggcaggagaattgcttgaacccaagaggtggaggttgcagtgagttgagaatgtgccattgcactccagcctgggtgacaagagtgaaactccatttcaaaaataaataaataaataataaaaataaaaatacaaaaattagctgggtgtggtggcgggtgcctgtaatcccaactactcgggaggctgaggcaggagaatcgcttgaactcgggaggcggaggttgcaatgagccgagatcacgccactgcactccagcctgggctacaagagtgagactctgtctcaaaataataataataataataataattctcagtaatttttgcaatttttttggtacctaaaataatttctgttattgtgttggataactttgtcaacttcactttgggaatatctaaatacaggtagctgcattcgagccagaggaatattgggtttttttgttgttgcttatttttgaggcagccttactttgtcacccagactggagtacattggcacaatcatggctcactgcagccttgaccttctgggctcgtgtgatcctcccaacccagcctcccaagtagttgggactaaaggtgtgcaccaccatgcctggctaatttttaaatttttttgtagggatggaattttgctatgtcacctaggctggtttcaaactcctaggctcaagcagtcctcccaccttggcctcccaaagtgctgggattacaggtatgagccaccacacccagttgagaaatactgggttttaatcaagattattgtctgaatattgagtcttaatgacttttttgattttgtttttttggccatagtattaagtttgcagttgataaccttctgtactaactagaagtagtatagaaactgcaaattaaaaaaaaaaacccaggtaaaatgttgatggctgctatttttatttaaggtattaataaaggaaaagaagtcagggacattatggaggtcaagttttatattattaaaactcaacttcatgatttatacatacttagaaatagtctgagtgatgtgtgaccaaaatatgatttctaggaggaatgattgttacatccgtggaatagctgcgtacactttattgttcttggtgcttaaactttagttgtcctgctaagataaaggaagacattctttcagttggaaatcatgataatgtatttctccattgaaacagtatggtttgaacagtgctatatattcatactcattattattccttaaatgaatattttaagctcctgatagaaggcaggtactgtgttatatgctgtttgtgttaccagaatacaaagatgaagagaacaaagtattacacaattcctaatctcacataaatgctattttttttttactagctgtggggagcacaaaataagtggttgaaagtcatctgacacagttacatttattcctttccttttccatggctcttaggaataaattgttctactctatggattaaattgccctttgtttattgcctgggatcccaactttatttcataattttatttctttgaggaaacgtttcacaagttttataacaaagtataactcaatttggagagcacaatctgtgcataagttggaggctacctattgtgaaatggaaaaatgcttgtcctagcattactgagttaatgtatagctggtagaaagttttcactcttaattgctaacttgcctagtgagagtgaaagattgattacggcaactaaaaagtataaaaactactgagtagtttttaggtacagtcagttcttcagtagaacaagaatctttagaaataactttcactaattctttactagttgtttttcctatttctcttggatatggatcatcagaatgttttttgtccctcttacccgccccccccatcccccaccccccgcctcccacttttttgttgggaggcttatgtgagagcattagaggccttgaatgtttgggtagacaaggtaagtattcaaataaacgtttcaagatcattgtgacagtgaaattatttgatatgaaaaaggatctcagttattagaaaaaacacaactgtgttaatactgacagccagcgttgctataagtgttttatgtgcattatctcacttaagctttacaacagtcctaagagaggaatgctgtggttattacacccacttgacagaccagggagcagaagcacagaaacccaaggatttctgctgtcaatgtcatgcatttggctggagttatgatgtcgtgcaagtaatgttccttctttttccctctaattcatttttatgtttttcttttacagggcaattttgtaagatttagtttccaggggtcaggtttgtttgggctttatgtccttgggaaatcctcagtaccttatttcccatattccatactttttaatcttaattttttttcccctcaaatgttatacagtttaatgagtcaagtggtctttcagggattcttaaaacaaacagtaattctcagcctccaccttcatttcctcttctcataggtaaccatcctcaactcataggtatttggaatttacctgcggtttttcaagaaacatttaaaaaattgatttacttgaattttcaggttagaacataaattatttgcatgatttgctgtgtccttgtgactaactcaacctaaacattctatcagttgtccaaatttcccattttctttcaaatttcccatttccttcacttactttgtcagtttcatcatcttgaagaagacttttccagagcacagtgctccaacatggagtagtctctgttttctcatagtgcccagcaatcatccttggaattctcttttcttttctcctgcattggcacttctgtttcttctcctcttatgtcttcctgtttcatgggaggcaaatatttgataccttatgttttctgaaaacactttattttcctctcacccttcattagtggtttcactgtatgtaacattgagattgatgattttgctccattgtcttctagcttgtgttatgcctgttgaaagtacaaaatcattctggaagtttatctattgttagccatttccctcttctggaagcttgtaggatcttccctttgtttccactgttctgaaacttgtaaatgatacgctttaatatggttgtactgtattttaaacaattatgctctgcactcagtgtttttttgttgttgtttttgttttttaatttttaaatttatttatatatttttaaatttattgtttttgtttgttttttgagacagaatcccactctcgcccaggctggagtgcagtggcatgatcttggcgcactgcaacaacctccgcctcctgggttcaggtgattctggtgcctcagcctacccagtagctggaattacaggtgtgcatcaccacgccaagccaatttttgtttttttgttttgttttgttttgtttttttgagatagagtatcactctgttgcccaggctggagtgcagtggtgcgatctcggttcactgtaacctccgcctactgggttcaagccattctcatgcctcagcttcccgagtagctgagattacaggtgtaccaccacgactggctaatttttttgtatttttagtagagacagggtttcaccatgttgggcaggttggtcttgaactcctgacctcaaatgatccactcacttcggcctcccaaagtgctgggattatgggcgtgagccaccgtgcctggcttcactcagtgttttcagttacgaaacttacattgtttagttttgggacattttcttgaattatttcactggttttttttcctctctgttttctcctgtggattccccattgcatagatgctgaattatcttgactggacctccagttttttcttcttgattctgttgccatctctttgattccttattctttctgataaattttcctaagtttaatttccgagagctctttggaaaagtatcgattttttttcatggatggagtatctactcttttgacacagggtcttgctctgtcgtggctcactacagctttgattgctcaggctcaagcgatcctcctgccctagccctcccagtagctggtactacaggcctgcaccgccaaacctagctaacttttttgatttttagtagacaaggtctcgctgtgttgcccagactggtctcgaactcttaagcgccaagcatttctcttgcctcagcctcctaaaattctgggattacagtgtagtatcttctgtattctttccatggacgctaatgatggggtataaaattccttttatttatttattttttattgacatcagaaattcctgctaataaaattctttttaaattttaagtttttttcttcccacagttgtccgtgtttcctccaagttccttttctattttttgttttcctttgttttctttttgtggtagatgctttcctcagatgagtggtaatccttggctgtttgcagttatgcctctaaaagctgattggaagctcttagtacctcattggtacttgttgactagagttcactctagggtgatctatctgtgtcatttgctggggcacccttcatgtcagcttctgattacttttcccttttctgaaaagggagagaggtcttttaatttcctgtctggtgggaggaggtctgtatgccacttctgtgagagagtgagggaagtagggcagtgaggatttcagtattcagtacatatgtgttttcttaaggcctctgttttcattaagcctcccccgcaccaatgtgctttatgtttccctgctctgaaatcctcctgagggaataatcctctagaattttgccttggtgggaaaagcatagtaacctaaccatgtggtatttaggaaggtactgagagattgagcgtttcctaaggagctttcagccagccttctttatttagtgctcccttcacacctgtttctacaggcgctatctgttaccagttcctgagccttttgaagattccgtggacgaaggttggtttttggctttccatactgctggtttcttggatctgctatgtcagttaccatttatgcatttgctttctagcttttaagttttgtttatgccttaaaaatacctgatgagggccaggcgtggtggctcaggcctgtaatcccagaactttgggaggtcgaggcaggtagactccttgcatctgggagtttgagagaagcctgggcaacatagcaaaaccccgtctctactatagaaaaattaacccggtgtggtggtgcacgcctgtggtcccagctacttgggaggctgaggtgggaggatcgcatgagcctgggatgtggaggttgcagcgtgctgagatcatgtcactgtactccatcctgggtgacagaatgagaccctatctcaaaaacaaaaacaaaaaaaccccaaaaaccttattagtattttagcacaatttggggaagaaatgaagttaaatatatgtatgttccatcttctctttacccagaacttatttctaattttttttttgttaagcatcttttttgttgtggtaaaatatacataaaatttattatttataagtatacagttcagtgacattaagtacattcacaatgttttacagccatcactactttctagttctagaacttttctatcacaccaaaaagaaaccccatacccattaagcagtcactccccattccctccctcccccagcccctggaagccacgaatgtgctttttgtttctatggatttgccttttgtggatatttcatataaatgaagtcattcagtatgtggccttttgtcacatgttttcatttaccataatatttttgtggttcatctatggtatagcatagatcactgcttccttcttttttatggctcaataattttcattgtgtggatatatcacattttgtttatctgttcatcagttgatgaacttttgggttgtttctgctttttctggctattgtaaatagtgctgttatgaacactgatgtacaatttttgggggtgaacatttgtttttattcttttaggtatatagctcggtgtggaattgctggatcatatatggtaattctgtctttaacttaatgaggaactgccaatctgttttcctcagtgactgtaccattttatattcctattagcaatacacaagtgtcccaatttctccacatttttgccaacactgttttccattaaaaactttttattatagtcattctagtgggtgtaaagtggtatctttttgttttgatttgcatttccccagtaactaatgacattgagccttttttcatgtgcttgttggccatttgtatatcttctttggagaaatgtctgtttaagtcctttgcccactttaaattgtgttgtctttgtgttgtagagttgtaagagttctttatacattctgggtactagacatgattttcaaatttagatacatgattttcaaatcttttgcctctagatgttttttacttttttatttttgatccttgaactcatctatattctatggttgtgatgtaatgatgacagaattggtgtcatttgtgtttatttaccaggttatttggaaggattatattttaggtgctctcctctcccccagtaaatggtattacgacacaagggttataaaggactgataagaaattacttaagacagaaagggaagttggcctgcttccaaaatgtggtcccagcagaagtgaagttagttacaccaataaccacagtcaaaaagctatttttaaccatgataatgtatttgttgttattaatattaaagattatattttgccaggtgcagtggctcacatctataatcccagcactttgggaggctcaggcggatggatcacttgagctcaggagtttgagaccagccagggcaacatggtgaaaccccatctctacaaaaaatgaaaaattaaccgggcttggtggtgcgtgcctgtagtcctagctacttgcgagtctgaggtgggaggatagcttgagcccaggaggtcaaggctgtggtgagccgagatcgtagcactgcactccagcctgggcaacaggacaagaccctgtctcaaaaacaaaacaaaacaaaacaaaacaaaacaaaaccgactatatttctgcattaagtgggggtttggaatcctatctaatatttgagataataattgttatagtattttattgagcttttattgggtaccagatgtgttctaagtttttttcgtgaattattttcattaatcttattcattgttgtgtcctgaatgagtactcacatatttgttgaagggctcaatggtccctaaaaccttagatgctgttttggaaggttaacttgccaaaggtcacatagttggcaaatgatgaagctgagattaacattaagatctgattccaaagtagtctttcttaactatattgctttatgtggagttttgccattgatgtctagacagaaaatctctagcaatggaaaaaaataatttttaattaattttaatttttttagtgttttgcttctttttttttttattttgtgagccaccgtgcccaattggtttcttttaaaagaccagttagtttgtgcattaggcctcttgattaatctgaggtatttaattaatatctttgaaatccttagatttactgtatcacttctgcaatatctaaatttttccttcttacttatttctgttctccttctacagtcctttctattatgtttaatcatcaaaacgttgttcttgttttctattgcaatctaatttttagtgttatgctgtttccagatgccatttgggtcattttcaaaaaaagatgagtaataattagcaagtaatgaatattgttctttttaccattcattaagaacaattgttaattgtcttattctattgtgaagaatatctgtaattcctgcttagaacctgggttgatagcaggatatcaggaagcactaagtgtacacagaacgatatagctggaaaaagtatatatgttaaagaataatatgttgtctaaggatgatcacacaggttcttttttggtaagcttcaaaacttcttatctcccatgaaagtactttttcttttataatatgcaacaataactttctgtttagttaattagttttaaaacaagcttaaacttataatttataaagaatcatatttgctccctatcattgttttatagctggggctatactgacaaataagaaaaataaaattcctgcccttgtggaggagacagttaaaaaatgggacaaatacatttcagatggaaatgaggacaatggaagaagagtagagcaggatgaaggcatgaagggtgactgagatctggtcaatctttagatagtgtaatacgggaaactgctttgaaaagatgacttttgagcagagaccttaatgtactgagggagtgaaccattcgaggtctggggaaagaattcagcttcctcttcagatgtacaaaattacaagatattgccattcttgtaactgaaaacctataaaagcaggataagaagtacggtttctaaaaacccatcgaagagctgaggatacaagggagcctaaatgaaccaaactccagaaagtaatcaaactttcatagtggagaagaaacccatggttgctctaggatggaacaacgaaaggaataggaatccaccatagatgaggggaaaggagaaaccagccacatttttttaaaatcagatttttaatggccacgtatgggctggtttgacaggttaggatcctaagaagccctagcaactctggcaccaaagagcaagtatgcacccacactccagctcctacccacagatgttcactgaatgttcaggagtagtaagccaaaagcctgggccagtgacgaactggcatagataatacctgaggcatttggaacctctcccaagtatagggcaaccacccttagaaggcaggattgctgagaaaaatccagcagaggctctccaggctttcagttctggaatgctgcaggcaggggaagagctagaaataactctcaccccacactctggcagtccatgttttcagccaccaaggactggggacagggcagaagaggtgagtgaaactgctctaattcatttcaggccttcacagaatgtaaggaagctgccctccagaagcctggctggggaggaggagcagggctgcacgagggcacctgagcttcagaaagcaaggtgtgcgactggagagcaaggagaatctagcaaaccaaactctgaccgtggcgcttaatgcagagatagagttcctacagcttttttttctttcttttttaaaatataaacttgaatttttgaaacagtttcagatttaaagaaaaattgccaagatagtatagagagttcccataatgctgcctctagtttttcctatttttatttaatttatttatttttttagtttttcctatttttaacaccttatattagtatggtatatttgttataattaatgaactaatactgatatattttcattaactaaagtccatactttatttacctaatgttttgggatcccatttagctgtcacgtctccttagggtcctcttggttttggcattttcttagacttgagcttctcatctcttgtttttgatgactgacagttttgaggagtattgttcaggtattttgtagaatgtcattctattgatatctgtttggtatttttgtcattgttacagtgaggttttgtatttttgggacgaagaacatgcaggtgaagtacaatttgctttcctttttttgagacagtgtctcactctgtcacccaggctggagtgcagtggtatgatgacagctcactgcagccttgaactcctgggctcacatgatcctccctccttagcttcctgagtagctgggactacagatgcatgccaccacacctggctaatttttttttttttaatagagacagagtctcactgtattgcctaggctggtcttgaactcctaggctcatgcaatcctcccacttcagcctcccaagtagttgggactacagacatgtgccactatgcttggcagtaccattttcatcacatcatattaaggggatatactgtcaatatgactaatcagtgttgatattgaccttgatcatctggttgaggtagtgtttgtgtatttctttactacaaagttactcttttttctcctctgtttacatactgtactctttggaaggaagttacatatgcgcagcctacacttaaggcatggggagttatgatacccctcctcaagggcaaagtgtctgtataaattatttagatttcttctgcatggaagatttgtctcttcttcctcatttatttatccattcaatttttaaaatattagtatggacttatggatattttataccttgggttaaaatcttattattgctttatttattttattgttcaagttgttccagctttggccactgggagctctttcagttggtatgactttttgatataccactgtcagtatatgtgtgtatgtgtgtttgcactttctcactttctggcactacaagatgctctagtatatttagagactaaagcatgtagtatatgctttagtatatgctttatctagtatatttttctgtctcaatcctagaattagccatttctccatggagccttggttccttttactggagaatggagaaaccaagatctaggtgctaggtgtacatgttgctactggggtgtttttgcttgtaggccatctcagctgacagagccagaaaatgtatgtatttatactaccctgtatatatccacatatctataaatatttctatatgtatccatccgtatctaattaagctaaacatgagtttatattgatgtattaggttccagttgaatcactacatggatgattctaacttcctgcccttgcttatctgaaaactcctgctccaatagtgagaaatctgtctcctaccatcagccacccatttacttaatcattctactctagtatacatgtaaggtactcccacagttttaaaaattggtggcttggctatgaaacacaagcaggtctctgtaattttacctaggctcagatcccagacctgctcaagtgaaaggcttgatctcagtccttaaatatttgaagccagtgattaatgttaaattaaagctgcatcatagcccacacccagctcagttacatattggattgactcagactcccttctagtgtcctaacagaaaaattgtcatgtctttttctggaagtaaaatattacttaatttaataagtaatctatttttatataaaatgtctggtgtgtaatgaaaagttacaaggcacaagaaaagcaagaaaatgtgaccaaaggtcaagagaagaaatagtcagtagaagaagacccagagatgatccagatttatcagacagggatttaaagataattatgaaaaaaatgctagatgattgaatgataaaggttaacaatatgcttgaaaagatggggatttctgtagagtcatggaaattatgccaaagaaccaagttgaaattctattaaatagaggtgaaaaatatactagcagagaccagggaaaacaaaaaaaggaaagaaaagaaaaggaaagggaagggaggggagggaagggagaaagaaaaatatactagcagaaatgaattcattacatgggcttaacagtttatggacatagcagaagaaagaatcagtgaatatgaagacagattggaaagagaaaagacagaaaaagtcagggaggggtagaaaagagattttagatctgtgggataatatcagatggtctaacatatatgtaattggagtttcagaaggagagaagagaacgtggcagaagacatatttgaagagacaatgctcaggaacttctaaaattgatgaggtcatcaattcacaaatggaaggagttcagcaaatcccaagcaagttaaatacaaaacaaaaataagccaacaaatttaaaaatcccatatataggcatatcataatcaaactgctgaaaactgaagatggaagagatcttacaagcaacaggagagcaacaggagaataaaagacacattagttatgtgagaatggcaacatgggttatggctattccatgttttaggaccagaaaaaaatggagtcttagctgagcatggtggcacatgcttgaacccaggagtttgagtccagcctgagtaaagtagtgagaccccatctctatttaaaaaagaaaagaagtccaggcacggtggctcacacctgtaatctcagaactttgggaggtgggcaaatcacaaggtcaagaggtcgagaccatcctggccaacatggtgaaactgcgtctctactaaaaatacaaaaattagccgggtgtggtggtgcacacctgtagtcccagctactcgggaggctgaggcaggagaatcacttgaacccaggaggtggaggttgcactgagccgagatcatgtgccactgcactccagcctgtcgacagagcgagactcagtctcaaaaacaaagaaagaaaagaaaaggaaaaatagaatgttaaatacaatgggatgacatccataaagagctgaaagaaaaaaaaaaaaaacaacctgttaacctagatttctatggccagcagaaatagccttcaaaaataatggcaaaataaagactttttggacatatcaaaaagggaaagaatttgtttccagcagacctggactcaaaaaacattaaaacatacacattaacaagatgtgggttttacagcatatatgtgattatacaaccatgaaagaacaaaaaggaggagatggaattatactgtcatacatttcttactctgtgaaaggagactgtagtaacttctggatgcatatgtaatctctagaacaagcactaaaaacacaaacagggataccataaagtcagtacatctgcccaagagggattaaccgctacgagaatcattctcctactgtaaacagctagaaaacaggacaaaaatacatgaaacaactgttttcagacattggacaacaggcagcacaggatagtgatccctgagagaagggaaataactgatatgaaccctacaggggttcctataggcagtttccagattgtagcacagagtaggggaatccaaatagagcccaggagagtttggagaagtcaaggcaactagaatttgtggggcagaaaacaagaataaaaggaactacacagaaatctatagaagtaagagaatctttgattggacactcatctgcacatgtgaagtgtggaagtcagcaatgctggagaaagtcacactggaaatcagaacactgaacaattccaggagctcacacagagctgggaatagtttatgtttccattaggcatagtggagagactgtttcatacaaaggacattggctagagtcttcaaagtggggttaaattagctatagactaaaggcctttctaaacctaccctaagcttcaaggcaggttttgaaaggaccaggctgattctaagtaactcaattatgtgccaaaactaaactcttttaaagaatacagtaaatgccagcacctaacaattaaaatgttcagcattaataatatattaatgaaagattactaggcatacaaataaaaagcaggaaaatgacccataaccaggagaaaaatcaatagaaaagagacctagaaatgtggaattattagaaataattctgatgattgaattatcagccaaatatgttaatacaagtattataatgactagtagagaaatgaatgatagataaaaagacacaagccagatgtggtgaatcatgcctacagacttgagggtaggcagatcagcttgcccaacatggcaaaaccctgtctctactaaaaatacaaaaattagctgggtgtggtgggatgtgcctgtaattccagcttgggaggctgaggcacgagaattgcttgaacctgggaggcagaggttgcagtgagctgagaacatgccactgtactccaacctgggtgacggagtgagactttgtcgcaaaaaaaaccaaaagactcacaagtagtatctaaagatgaaaaataccagatataatatccaaaactgggggaaaaactggatgtgattaacagcagattagacactgcggaaaaaaagatcattaaatgtgaaggtatagcagtagaacctattcacattgaagcacaaagagaaaaaaaatactagaacaaagttaatagaacatcagtaaccttgggacaatagcaagttgcctaatacatgtataattggagttccagaaaagtggggaaaggtagaaggaattactttaggaaacagcgtctgggtggccaggtgggtggctcacacttgtaatcctagcactttggggggccgaggggggtgcagatcatttgagatcaggagtttgagaccagcctgtccaacatggtgaaatctcttctctactaaaaatacaaaaattagctgggcttggtggcatgcgactgtaatctcagcttcttgggaggctgaagcatgagaattgcttgagccagggagatgtaggttgcagtaagccaagatcatgccactacactacagcctgggcaacagagtgagaacctatctcaaaaaaaaaaaaaaaaagaaaaagaaaaagaaaaagaaaataagaaaatagtggctcatcatggtggctcatgcctgtaatcccagcactttgagaggctgagatgagaggattttttgagcacaggagttcaagaccagcctgggcaatttccttaaaaaagaaaaagaaacagtgactataaattttccaaatctgatgataaccataaactctcagatccaagaaactcagtgaactctaaatagaataaacaaatataatcatacctaggtatgtaataataaaattagtgccagtcatggtggctcatgcctgtaatcctaacactttgggatgctgaggcccggagtttgagaccagcctgggcaacatagtgatacccctatgtctacaaagattaaaaaatagaaatataaaaagttagctaagcatggtggcacttgtctgtaatcccacttacttgggaggctgaggtgggaggattgcttgaactcacgaggtcaaggctgcggtaagccataattgtattccacccagggtgataaagcatgacgggagatcctgtctcaaaacaaaacaaaaccaaaaaaaggcgaggcacagtgactcacacttgtaatcccagcattttgggaggtcaaggtaggatgatcgcttgagcccagaaattggagacaagcctgggcaacatagtgagaccctgtctctcaaaaaaaagtttaaaaaggcgggcatggtggcatgggcctgtagtcctgtctactcaggtggctaaggtgggaggattgcttgagcttgggaggttgaggctgcagtgaactgtgttcgtgccactgcactccagcatgggagacagagcaagatcctttctcaataataacacataaaccaatgttacaatgagaagaaataaattctggtgttcggttttttgtttttttttttctgagatggagtttctctcttgttgcccacgctggagtgcaatggcatagtcttggctcactgcaacctccacctcctggattcaagatgattcttttccctcagcctcccaagtagctgggattacaggtgcatgccaccacacccagctaattttcgtatttttagtccatcacgttagccaggctggtctcaaactcctgatctcaaattctggtgttctattgcacagtggggtgagtatagttaagagtaaaatattattacaaaatagctggaagaggggcttttgaatgttctttcactaactgctctgattggatcattatgcaacatggatatgtatcaaaacatcgaactgtggcccggcgtggtggctcatgctggtaattccagcactttgggagtctgcggtgggtggatcacctgaggtcaggagttcaagactagcctggccaacatggtgaaaccccatctctactaaaaatacaaaaattagctgggtgtggtggtgcatgcctgtaattccagctactcgggagactgaggcgggagaattgcttgaacctgggaggcagaggttgcagtgagctgagattgcgccatcgcactccagcctgggcaacagagcaagactccatctcaaaaaaaaaaaaatcaaattgtaccccataagtatgtacaattacaatatgacagtttaaaaaataaattaaaaaaaaattctcttgtacttaccagctgaataaaaaataaatttttaaaaggagagaagtcttcttaaaaaccagttatttaccccatcattaagttataatgaactttcttatgggaattctttgataaggaagctcctttatgctgaagttttattcttttcatacctctttagataaatcagtgctttaggagcatatgtcatatgactcaatggcagtgttctaacttggattctagctccacattgtgcaaaggcaaaaaaccagagagtcagtgtggtagttaagaacttatgttctgctgtttgatttcctacatgccagtactccctccactacctgcagtcttcctgacctggggcaagttccttttgtaaactctgttttctagggggatggtggtggaagaaggatggtgatttgagccaggcagtagcaggtggaggtggagaaaagtggtcaaaccctgaatgaacgttaaagataggaccaaaaggatttgatgagaaattggaagtagagcacggggaaaaagaaagatatcagtgatgatgccaaggtttttggcctggggaattgggatagtggagttgttatttgctgagtatgacttttcacaaaggaatgtcaaggcgtaagtagcaaagttctttttttttttttaatttttcttgattgtgtttgttttgtttttcatcttttgtgggaggtgggtggagatgaaagcaagcacaggggttggcaggcatacccctggcacctacctgtgagttcatgattactagtcttaaagttcagtcctttttatttttactttttttttttttttttttttttttagagacagtgtctcactctgtcatccaggctggagtgcagtggcacaatcacggcttactgtagccttgatctcccaggctcaggtgatcctttcacttcagcctcctgagtagctgggactacaggcacataccaccctacccagcaatttttttaaaaaattttttgtagcgacatagtcttaccatgttgcctagactggtctcgaactactgagctgaagcaacctgtctgcctcagcctcccaaagtaaagtactgtaattacaagcttgagccaccgtgcgtggccaaattctggccttttgatgttgcatggtgtggatggggaggcaaagtgtgatattttaggaatttgaggatttcttcttcgaccttaggcgtgacattggacaaatgacatctgggctgagacattttctagtaatgctggatccaaaaaactcttatcccattgtctcatagcttcattacacagacctggcggccatgatcctcttttttcccccttagttgccaaacatgggttctctgtcttacctcatttgagtcttacctcagtcttgagagtctcaaatgtgtatcatagtttttagacaaaattcaaccttatttcaattagtatttcattgttatttaaatattttaacaggaaaactgagcaatgtttccctttacctgttaatcctgttataatattttagataaagtgtattagaaggcacattcttcattaatagaatatttattcatgtgtttatatggttcttaactaggaataccatatagtctatctccaaccctttgagaaggaaaaaagatcctgactaaacaggacaccagaagggcatgcctaaactaggactgttctgggcaaatcagaaggcatgttcaccttattctttttattctttctttttcttttttttttttttttttgtgacggagtctcgctctgtcgcccaggctggagtacagtgacgcgatcttggctcactgcaacctccacctcccgggttcaagcgattctcctgcctcagcctcctgagtagctgggactacaggcacatgccaccatgcctggcaaattttttgtgtttttagtagagacgggggttttgtcgtgttagccaggatggtcttgaactcctgacctcatgacctgcccacttcggcctcccaaagtgctgggattacaggcatgacccactgcacctggcctcaccctattcctaaggccagaaaaccagctagagtaaagttcactttctgtttgagtgcttggactttattgggagaaggcaaatgccctggaacaagagtgaaagggagaaattcccgttgtattgcaagccagaataagagaggctcacccacactggcctaaggcatctcagttgttgatgagaatgtgattacagatgtctcacttgaataccaaagacaattgcaaaggaaattaaaagttatgcaaagagagtcgagaagtcagttgtctgctcacaggttggctttagtggctattactttgagatactaaatgagcgatagctttaaacttcaactgcttttgtttctgaggaaaaaaatcatcttatatcttttcataagttgcataaaaagtggacattttctattattttaaagagtaaatttaggtacaagcatttactaatttttttttttttttttttttttgagatggagtctcgctttgttgcccaggctggagtgcagtggcgcaatcttggctcactgcaagctccgcctccctggttcacgccatgctcctgcctcagcctccagagtagctgggactacaggcgcccgccaccacgcccagctaattttttgtatttttagtagagacggggtttcacccttttagccaggatggcctcgatctcctgacttcgtgatctgcccgcctcagcctcccagcatttagtaattcttaaaagagttcagcatgaatatacacagtacgtgggttattagtactgtgttgttaacacaaatgaactatgatagcaaattgaatttggttcaatcaggtcaaagaataaaaggatgactttctttaaccaccagcaaaggatagtataatgaaccccatgcaactatcacttaacttcaataatttcaagtttgagtaagttgcagagtagtaatttgaacccacatctctcttgttccaaatcccttgcttttaattacaatcccatgtggcttctttgtcatttgatgctattgagcaactttatgatttttttggtgtttttggtaaaatagacatgaaaaggcattactacagggagttttttcactccctggtaataagaggggaaaagcactctcttttaatgatacatgttttgtaataagcatttttttttagttgcagtgttctgcaaagacaaaacctgctgatacaattcatcctgttttagaaatctttgacccattcatcagactctgaccactctaaagataaaggattatggttgtattggtttttccgactgaagcggccttctgcagattgagaaattgtataattattaactgcggtaatggagatgtacttgcaagtttcatctggtatcttaatgacctttaaccctctgagtacacctaaaacatatcctagaattattgaaattaatcagttgtccataacttttctgtctgtataatttggctatcatacatattttgtttccccctgcccttgccagtttccatcctcctactcacatactcacaactcctataaattggagtatttagtagcagtagcctttgatataaacactttttaaaaatttactattttttgaattaatagggccactttctagtcaagtttttttttggggggggggtgaggagggtagggtaacagttctacacttacaagggtatttgtttagaccaagcttgttcaacccacagcctgtggggctgcatgtggtccaggatggctttaaatgcaacccaacatgagtttgtaaactttcttaaaacattatgagttttttttgagattttttttgagacagagtctcgctctgttgtccaggctggagggcagtggcccgatcttggctcactgcaacttccacctcctgggttcaagcgattctcctgcctcagcctctggcgtagctgggattacaggtgtgtgccaccactccaagctaatttttgtatttttagtagagacggggttttaccatgttggccaggctggtctcaaactcctgacctcaagtgatctgcccacctcggcctcccaaagtgctgggattataagcatgagccaccgcgcccagcctgcgattgttttttttaagctcattagctatcattagtgttaactgtattttatgtgtggcccaagacaattctccttcttccgttgtggcccagggaagccaaaagattagacacccctgatttagacaaataagtgaaggcacactgaaataacagttatatataataaccttgtgccacccagcgcggtggctcatgcctctaatctcagcactttgggaggctgaggcgggcggatcagctgaggttgggagttcaagaccagcctgacttacatggagaaatcccatctctactaaaaatacaaaattagctgggcatggtggtgcatgcctgtaatctcagctacttgggaggctgaggtaggagaatcgcttgaacccaggaggcagaggttgcagtgagctgagattgtgccattgcactccagcctgggtgacaaaagcgagaatctgtctcaaaaaaaaaaaaaaagaaaaagaaaaaaaaacacaaaaaaaccttgtgttttgtggatctcacattcatctcagatatttcttgccctgggagatcctctgaattctcaggactgcttcgtgtcatccctttatgctctactatcttcccctgcctagaaggcaagtagggctttgaatctcacctttgattctactgtgatcctatcaaatatagtaatgctagaaatataggtctgaagtttgggagagagattggctcggtatagatatgtaaagcacagttgtatatgtggtagttatatgaatgggattggatgaaattctctagaggtgtgtggaatggaaagaggtggcccaaggaggaagagagagagagagaaattggagaggtagaacaatttaggaaagagtaatgttctagaaactaaggagagagtttcacaactgcagtggtgaagcactgtgagttcttatttggcaatttggacttcattattgtcttatcacagataggaaatgaaaggttgcagaacatttaggagaaaatattaagtgaggacacagaagcagtaaatgtcgtatatgccttttaaacattttggagattacccatagtaggcctgtcccttgggtaaggcaattagggcagctttcctgggccctattttggggtggggaatgactcggggactttattatatgactttttttctgaacattaataaaattcagtttcaaaattttgtgattaactgtagtcctaagagcctacgaaaaatgcagataatgggcagttccacattggttgaactgccccaggcttctctcttctagagatgctgtcccttccttttaatcctgtagtagctcctatcactttttttttttttttttttttgagacagagtcacccagactggagtgcagtggtgtgatctcagctcactgcaacttctgcctcctgggttcaagcgattctcatgcctcagcctcctgagtagctgggattacaggtgcgtgccaccatacctggctaattttcgtatttttatgggattttaccatgttgcctaggctaggcttgaactcctgacctcaggtgatccacctgcctcagcctcccgaagtcctgggattacaggcgtgagccaaggctcctggcctcctgtcactttttataattgtcagtttgtttttcctctcagaaattaagctccttaaagctctctattattgttttgaattcccagggcctagcataatgcccagcacgtaatgtttagtgtttgttacgtgagtgattgaaggaataatccaatacatatctgtcttaagtacaaaagaattccaatatggtggtctcacagagtcaaaaaagcggaatgtttcagaaaagagggattgataaacagtttcaaatggtactaaaagtattgaaaactgacctttggatttggcttctagaaggtcattggcttccatagtgaaaacttttataacaaaatggttggagtagaagtggttgaagattaaaggagaaatgagatgtaagaaacaacaaacaagtttgtgggggcgggggggttggttttatttttaaagatttgtagctgagcatgacagtatgtatctgtagtcccagctatttgggaggctgtggctggatgacagcttgagcccagcagcttgaggctgcagtgagccatgattgcaccattgcactccagcctgggtgagagagagagaccctaactcaaaaaataaaataaaataaaataaaataaaataaaataaagatttgaagctaaagggaagaaaccattggagaagaaagccaaagatctgatggaggagaattcattatcatggtaatgttatgcatttgatttgcatatatctaagtattcccaccaacattttttttttttttttgagacagagtctcactctgtcacccaggctggagtgctggagtgcagtggcacgatcttggctcactgcaacctcctgggttcaagcgattctcctgcctcagcctccctagtagctgagactacaggctggtgccatcacgccctggtgatttttgtgtttttagtagagatgaagtttcgccatgttggccaggctggtctcggactcctgatctcaggtgatcctcccgcttcggcctctcaaagtgctgggattacaggcgtgagccaccacgcctggccccaaccaacatttcaagataatatatttctcctcccacttgggtttgacatattaatgtattttgaacttgaaggcttttgctgtgctatttggggcccctagtggtaaatctaataatgacatgcaatagaacagctaatataccagttattccttatgaaggttattctttctatgaggattaaatgaggttggaatatgtagttatagcaatagtagtgattcttaatcatttttttaaaaagagagtctcgccaggcacgttggctcacacctgtaatcccaacactttgggaggccaaggtgggtggatcacttgaggtcaggagtttgcgaccagcctggccaacatggtgacaccccatctctactaaaaaaactaaaattagctgggcgtggtggtagacggctgtaatctcagctactcggtaggttgagacaggagaattgcttgaacctgggagacaggaggttgtagtgagctgagatcgcgtcattgcactccagactgggtgacaagagcaaaactctgtctcaaaataaataaataaagggtctcactttgttactcagactgaagtgcagtggtgtgatcatggctcactgcaatgtccgcctctcaggctcaagtaatcctcccacctcagcctccctagtagctgggactataggtgttccaccactatgtccagctaattttaagaaattttttagtttttaaatttttttgtagagatggtggtcttactatgttgtccaagctggcctcaaactcctggtctcaagtgatcctcccacctcggcctcccaaagtgctgggattaccggtgtgagccaccatggctggccaaaaatgagtaatttttttttttttgagatggagtctcgctttgtcgcccaggctggagtgcagtggtgagatcttggctcactgcaacctcctcctcctgggttcaagcgcttctcttgcctcagactcccgagtaactgagactataggcatgggccatcacagccggctaatttttgtatttttagtagagatggggttttgccatcttggcctggctggtcttgaactcctgacctcaagtgatccacccccttggcctcccaaagtgctgtgattacaggcgtgaaccactgtgctctgccccaaaatgactaatttaaaggtgactgtaatatagttaaacaaatgcctcttttcccattctttactaacttgttatttaaatggggcaagtttttacaacataagaaacaggccaggcgcggtggctcacgcctgtaatcccagcactttgaaaggcagaggcgagtggatttcttgaggtcaggagtttgagaccagcctggccgacatggtgaaaccccgtctctactaaaagtacaaaaattagccgggcatggtggcacagactgtaatcccagctaatcagggggctgaagcaggagaattggttgaacctgggaggtggacgttgcagtgagcctagatggcaacactgcagtccagcctgggcaacagagcaagactccatctcaaatgaaacaaacatactaaaaacctattaacttgtttgatgtgagtgtgcttagctttatttcccttaaagagagtctttttttgagatggagtctcactctgttgcccaggctagagtgcagtggtgcaatctaggctcactgcaacctccgcctcctgggttcaagtgattcttctgcctcagccttcaagtggctgggactacaggcatgtgctaccacgcccagctaattttttgtttttagtatagacggcgtttcacgctgttaggcaggatggtctcgatctcctgacctcgtgatccacctgcctcggcctcccaaagagctgggattacaggtgtgagccactgcgcccggcctaaagagagtctttaggtgaaaaatttttgtgaatattgtgatttctccttaataatttcttgtgtatttatgaatttatataattaaatggcatatcaaaaaaatcacctatgttaattatgtttttgactcagttatattttcttttggtacattattaagttaatatccatatgcaaaaatatgctgacaatatattaattttggatttttcatttttatcagaaatcatgagtggaggatctcaagtccacattttttggggtgctccagttgctccactgaaaatgacagtatcagaagacacagcttctttaatgtctgttgctgacccctggaaaaaaattcagcttttatacagtcaacattctttatatctgaaggatgaaaaacagcacaaaaatcttgaaaactatgaagtcccagattctattggttctccagatctttgtggtcatttcttagcaaactgtatgaatagacatgttcatgtgaaagatgactttgtacgttctgtttctgaaacacagaatatagaatcccagaagattcactcctctagactgagtggcataactagctctaatatgcaaatatgtggatttaaaagcacagttccgcatttaaccgaagaagaaaagtatcaaagcttctcagtgaaaataaaattagagatgaacagcctaaacatcagccagatatatgtggtcagaactttaacacaaatttgtttcagttgggccataaatgtgcagctgtgttggatttggtttgtagtactgaaaaaattaatatagggcctgaagtggtacaaagagagtgtgtgccaacagaatatcatgaaatacaaaaccagcgtttgggattattttcctcgaactcagtagataagtcaaggtctgaagcagcagttaagaaggtctcagaccttaaaatatcaactgataaagaatttctcagtataattacctccagccaggttgctttttttagctcaaaagaaagataaaaggcggagtcctgtaaataaagggaatgtaaacatggagactgaaccaaaggcaagttacggggagataagaatacctgaagagaattcgattcagcttgatggttttacagaagcatatgaaagtggacaaaaccaagcatattcccttgaactttttagtcctgtttgtcctaaaacagaaaatagccgcattcacataaactctgataaaggtcttgaagaacatacaggatctcaagaacttttcagttctgaagatgaactgccaccaaatgagatacgtattgagttgtgtagctcaggaatactgtgttcccaactaaataccttccacaaaagtgctattaaaagaagctgtacctctgaagataaagtggcccagtctgaagctctatctagagtccttcaagtagctaagaaaatgaagttgatttctaatggaggagattctgctgtagaaatggatcggagaaatgtgtctgaatttaagagtattaaaaaaatcattaataaaaaactgtgattctaaaagccagaagtataattgtttagtcatggtgctatctccatgccatgtgaaggaaataaacataaaattcggaccaaattctggctctaaagtgcctttagcaacagttacagtaagtgatcaatcagaaactaagaagaaggtttttctgtggaggactgcagcattttgggcatttacagtgtttcttggagatataattttactcacgggtgaggtcattatggtatagtggtagcttattttataaagctaagttttgtttgtttttgttttctcccacttagtctttgaagactctttctttagtcatttgcctcttctgagctcagcataattgatccctttattgcatctgcattgctctcctttccattgtccactctcctgcccattgccacttctgggcctctgttctatccttctcagctctgccccttctttccacttatcccctcctttaataagccttccctagtcaggtggagtgggtcacacttgtaatcccagcactttgggaggctgaggcaggaagattgcttgaggccaggaatttgagaccagccttggcaacacagaacccgtctctacaaaaaataaattaagttttgcgtgcctgtagtcccagctacccaggaggctgacatgagaggattgcttgagcccaggaggttgaggctgcagtgagctttgattgggccactgcactctagcccaagcaacagagttagacctttctgcttctttacctaatgtctaataatgctgtgcacattgtgtttttactgtgggaacagttattgatttctgttgccttattttattatcaaaattatattaattacacttggaaatatggaaaggaaaaaactggtattataccaacttcatataaccaccaatagagttcgagagtgttgccttccagttattttctctgttctccttaaaatgtgtgtgcatgtgtgtatatatcacacatagaagctcatatttattgggagcttagtttgtgagaccctgttttagattttacatgcatatttcattacaacaagtatatgaggaaggtactgatttttatccccacttttcagttgaggaagctgaagcccagagaagtaaagtaacttgtccaatgtcatacatctaggaagtggcaaagctatagtttctcctagactccagaatttatactcttactatatagttgtaaccataaagaacattttgtttttttaatttttaatttatttatttttaagagacagagtcttgctatgttgccaagtgcagtgggtactcacgggcacaatcccattactgatcagcatgagaatttttgaattgttatttttaattttttgtttgtttgtttaataaggacaggatctcactgcattacccagtctgatctccaactcctgggctcaattgatcctcctgccgcagcctcccaaagtgctaggattacaggcgtgagctaccgtgcccatggtatttttaacatgcccttgtttccaacctggaccagttcacccctccttagggaacctgtggtcctccactcccaggaggtcactatattgatggcaagcttagtgcaaacacctgatcggctacaactctgaactcctgggctcaagtgagcctcctgcctcagtctcccaagtagccaggactacaggcacgcatgccgctgcacccagagagaatatttaatttttttttttttttgagacagtcttgctctgtcacccaggctggagcgcagtggcacaatcttgactcactgcaacctccgcctcctgggtgcaggtgattctcctgcctcagcctcttgagtagctgagattacaggtgcaagccaccatgcctggctaatttttgtatttttagtagagacggggtttcaccatgttggccgggctggtttcgaactcctgtcctcaggtgatccgcccacctcgccctcccaaaatgctaggattacaagtgtgagccaccgtgcctggccagaatatgttttcaccgaagacatctaacattgtgttacgtgttctttgttgatttaaaattgacacatggtgtattagagcaggaggaagttgattaagcttaataaaatatctaaagaaagaatgtgatacagaggcggtatttagaaaaagaaaacttcgaagcaatattgatagtcctaccaaatagtttacaggaggaatgagaaccttagctaatgtaccttggtgttcctgtaggattgtcaagtacaatctttttttttttttttgagacggagtctggctctggcacccaggctagagtgcagtggcgcgatgtctgctcactgcaagctctgcctcccgggttcacgccattttcctgcctcagcctcccgaatagctgggactacaggcgcctgccaccgcgcgcggctaatttttttgtatttttagtagagacagggtttcactgtgttagccaggatggtctcgatatcctcacctcgtgatccgcccgcctcggcctcccaaagtgctgggattacaggcgtgagccaccgcgcccggccgagtacaatcttttataaagaggtaaacacaaaattgtaatgaacaggcttagcatagccacatcccactggcaatattagctaatattatttatatgtgattatattattggaggttcaattcacctaactccctctgttctgattcagtgcttgctgaatacctctttgcttgtgatttggctttctagttgtagagctgcccacagcatgagaacaggctgaaatactgtttttttttgggcaattattgtaaatgaaaaaaaaatgttttttttctttaatttgtttcattaattgatttagtatgagcttatgttgcagagctgaaatctagttttggagtgttaacaaaattaagtttcccagactgtaaaagagggctggatcctggaccatggtcattttaccgaggcaattaatgtcagcagggacctctcaggggccttttccgttttcctaggtaggtgtaaactcaactctgcaatctctgtattttttcctaacatctctatagttgttaacgactaggtaacattctctctggtggctgtaatgcaatttacttaaccattttcctattataagacatttagatgatttctatgaactttttttaaaaaatcagattttttttgtctttttaagaaaaagaggatctagttcaccgaattctgaataagtttcttttgtgtggaacagatggaaatgttgggaaaaaaaagaaatctacacttttctgttgtcctaatgagtcagtgaacttagttggatagcttgggtagttcatactacctattgatatatacccccaaacagaaatcttcctttttttttttttttttttttgagatggagtcttgctctgttgcccaggctggagtgcagtggcgtgatctctgctcactgcaacctctgcctcctgggttcaagtgattctcctgcctcggcctcccaagtagctgggactacaggagcccgccaccacgcctgactaatttttgtatttttagtagaggcagggtttcaccatattggccgggctggtctcgaactcctgaccttgtgatctgcccaccttggcctcccaaagttctgggattacaggcgcgagccaccgcgcccggcccatactgaaaaatttgaagtaacagatgtattccagaccttgttgaataccaacacagtagacagtttgctattataacttctagcaatagaatgaagagatgccaaaaataaggattacctaagggagactactgactagaattagaagaagatgggaggcttaacattgggaaaccacagtgtttaaaggacaaacagaataaggactaggagctggggcatgtcagtgagagggtaggaaggagccaggaggccagggcgggctacccatcccctccatgcaccactagtgattactatgtcactaatccaacataggcttcacagtcctagctttcagaatgctctccttgaaatttcttgtctgttccttttttctgaagaacatgcatcctgaatgttggatcatgaaaagtcttgaatgctgtactagctcttcctggctaggcagtggggaaccactgttttttagtaagtcacctgaactcattaatgctctgatatatcactcgcctgaactcattaatgctctgattaatgactcattagcattgtaagaaatgggttgcaggcgggacaagcacctgttgggagggaaaggaatgtgtaatgtaaaacagtagtagtggtggggcatgggcacatttaagcagcagaggggtaggtgggagctggtggcaaggagtgggaagggagaggcaagatgacttcagattttagtttacttgattagcagcatagcatcaacaaatgagttgggcgctatgaaaggaaaagcagatttggacattgctgagtttggggagccaatggaatatccaggtgggaatttccattaggcagttgtagataaaaggttcaaaagctgaggaaagggtctggaatctaaatctgtaagtaatcacttggaatttatacatccttggttttctttcctattatctctaaattatttcactattgttaatatacgtttatacctctgacactgtatgctgattagatcctgccttagagatagctcccttcccctctttctctttacagctcacacgttttgctctacctacaattgtttctacctgttggtatgtttagttctacctgattctactctatccgccttagatatacagctctctctttccagttggaaaatgttccctacctccaaagtctttcacttttaacttgtgtggaagataattatcgtgctatttagggaaaaataatcaagtatgttaagaatgccttatattcagatatatttatagtagaagggaccagtgcatactgaatattattactctcctaggcactacggctttggaaccactactttgccttctggtcctaaaaaaaattatttttgatgtatcagaaatatacatgataacattttccttatgtaaataaaagctattaaaccttttttatatagagcagtggacttccatactgctatcatttgaatataaagaagcaattttgttaatttacctagatttagattttagatttgctgttttgtcatttcgtgcccttaggcaggttatttaacctatttgatctctagttgcttggtatatgggaggcatgcataatattttgctgtgactagtaggttaaccacattgtgaaggaatttatggcatgatcagaatgtttttttctctctctagatgttgttattcatgaggaccaatggattggtgagacagtactacaatcaacatttagcagtcagttattaaatcttgggagttattcatctattcagcctgaagaatgtaaggcacattttaaatgaagtaatgtattagtgtttaaagtataaaaacatactaggaaagattagagttaaaatggttcttttacaaaatgttttctaaacagttggagagtattggtttcttttcattagtaagaatgaaaatagaattttaagaaatgaacttgtacattgtaaatcacatttattttaagaagtattgggtatcatgtttcgttttcttaggctgtcagtatagtggtggttcttcaccttttagggagtcagagacctctttgagaatctatagaccatttctccagaaaactggacttatgtagataggcacaaaattttgcttataattctaaagcattccgtggacctctgaagttcttctgtggaacttctgagcctctgattaagaatccttgaggtaataaaaatgtattggtctcgtattcagacagctgtggtttgaatccttattctcctgtctaccactgctaagaaaagctatctttcttctttaatgtccagttttctcttctttaaaagaagctgtttaatgaggaaactagcagctatctcctccactaggaaataaaatgacataaaaaaaagaaagaaaacaaagtaagggaaacagtataaacttgtggttttggtcactggactcagatagaccaggatttgaatcctggccctcttacttccagtctttgtctttaggcaagttatttcacttcactatacctttatctccttttctgtgaaatggagataaaaatacatatataccttatagggttgttatgaagattaagtgagaaaatgaatataagatgttgaacctgcacataatgtagtagtaacatagtaatattagagggagaaataataagctagcaaaatatatttgataaaatgctgaagtatcatacaagaaaatagctagagaaatatactgattatacaagaagataactggaataataggaaagttataggatgtatatggaagatagagcatggaattccaatctttgaattcttaaagaaaggcagagcaagtagaagggaagagcaacaattagaataacaagaactgtgtttgggatgggcaaggtttcattatatactagggtggcccatcagcagaaaaccaactctgacatatttcatagacaactcaaatagagttcttcatctatccaatatatatttattatgtgttgacattgtttcaggcactgtgtttactgtacactgggggtacaatggtgcctgtcctcctggagcttatgttctcatgtggaagacagaccaaaaaaaatgaatgaaacagacatataagtaaaatatttgcaggtgataatgagtgctatgaaggaaactaacaaagggttaagatacagaatgccatggttctagttgagaaggattgatcatggagtagaatcagggttaggaagttgttacaatagctgcagttgagagataatgggaggccagtggagctaaagagccgagatatatttgtaaatagagttaataggattttctgatgatgtgggtctggggatcagggaagagggacaatctactgctactggattactggtttaagtaactaggtagcctttattgtgaaagactgagagggaactggtttgtggggaaaagggctatgtttcaaggcatgttaagttttagatatctttgagatattcaagtggagatgtcatataagaactggaaacaaagttcaggactcagaagacaggtttaaaattaagaggcaaattttagagttattagcatacagataatatttcaaatttaaaagtttttaaaataaatattatctgtataattatagaatcacaggggattgcaaaaataatacataaagtcccatgaactcttcttctagcttctcccaatggtgatatcttatataactttagtacaatatcaacaacaggaaatcaacatttgtataatactgttaactagtaatatactaggatactttccctttcagtatcaataaatatagtatcagcctggcacagtggcttatgcctgtaatcccagcactctgggtggctgaggcaggaggattacttgggcccaggagctcgacaccagcctggatgatatggtgaaacctcatctctactaaaaatatggaaaaattagccaggtgtagtggtgcacacctgtagttacagctactggggaggcttaagtgggaaagaaagttgaggctgcagtgagccatgattgtaccacagcacttctgcctgggtgaccagagtcagaccttgtctcaaaaaaaatttttttcttaaataaataaatatagcatcaatacagcattataatatgattaatactatatcaataaaatagatacttagtcctaatgccaatgtcttatttaatagaaaagcactcgaggcattgtcattaaaaccaggaaaaagataaggatgtccactatctctgcaactattcatcttatactagaattatcagctaacgcacttagacaagaagaggcatctggtctggtgcggtggctcacgcctgtaatcccagcactttgagaggccaaggtgggcggatctcttgaggccaggagtttgggaccagcctggccaacatagcaaaaccctgtctgtactaaaaagatgaaaaattagccaggtgtggtggtgcatgcctgtggtcccagctactcaggaggctgaggcatgagaattgcctgaacctaggaggtggaggttgcagtgagcacctgtacactgcactgcagcctgagggacagagcgagattctgtctccaaaaaaaaaaaaaaaaaaaaaaagaaagaagaggcatttgaacatttgaatggataaagaagaatgaaaattatctctatttacaaatgctctgataacatacctgaaaactccagggaatcaaagttaaaacaaatttaaataataagataattcaatgatataacaggatgcaaaattaatgttaaaaaatatcattaggctgagtgcagtggtttgcgtctgtaattctagccctttgggagatgaaagtgggtggacagcttgagcccaggaattcaagaccagcctgggctacaaaaaagaaaaaggaaaagaaaaagaaaaagaaaaaaatgctgggtgtggtggcacacacctgtggtcccagctgtttgggaggctgaggtaaaaggattgcttgagcccaggctgggggatgaggttgcagtgagctgtgattgcaccactgtactccagcctgggcaacagagcaaggccctgtctcaaaaaaaaataataataatagtaattagacaatatacacaaataacaaacagagggcataatgatagtgaaaaactcatttactatagtaataaagaagatagttcaaaatacagttaacaagaaatatgcaaagcctatatgaggaaaaaatttaaacactccagaaagaaatgaagacatgaataaatggaaagacatttcctgttcttggataggatgactcaacattataatgatgtcagttcttcctaagttaatatgtaaattcaatgtagttccaatgaaaatatatgtgttgtggcatataaaagttgatactaaagctcatatgggaaaacagacatgcaagaatagctaggaaaagactgacaaaggaaaactacagaggaggggaactagctttaccagatgttaaaacatactataaagcctctgtaattaaaacagtgaagtactgatgcatgaatagacaagtagaccagtggaatagagtaagaagattagaattagacccacctacatatagcaatttaatatatgacaaagatagtatctggaatcagtgagataaaagctaacttcttaataaatggtgctgagacaactgggtagccatttggaaaaaagggaaaattggacacgtatctcacaacaaacagtaataaacaccatatggattaatagtctaaatgtaaaaaataaaatcatgcaacaacaagaaggaaacctgaatgaatcctctgtaatcttggtgtagggaaaggctttttcttaatattactcagaatccaggggcagtagaagataaactgatacattttactgtagaaaaataaattttgcataaccaaaacactataaacaaagtcaaaagacaactgacaaacttggagaaaatatttgtaacatacaacaaaaggctaatatccctaatatataaagaacttttaaaccttgagtgacaaagtctgggtgtggttgttcacactggtaatcatagcattttggaaagctgaggtgggagaatcacttgagctcaggagtttgagtccagcctgggcaacatagtgagaccctgtctctacaaaaagtcaaaaaattagccaggtgtggtggtgcatgcctatggtcccagctacataggaggctgaggcaggaggattgtttgagcccaggaggtcgaggctgcagtgagctgtattcatgccactgcactctagcctggcaaaagggaaaatgtgaaaaagagatgaacagtcaattttcaaaaaaagatataaaaatggctatcaaatataacttattagagaaattcaaattaaaactacatggagataccatttctcacctatcagattggcaaaattaaaaaaaaaaaaagcacattctgttggcgcaactgtgaggtaatgtgccctcttatacattggtggtaggaatgcaaattgctacaacccttttgaagggatatttggcaatatctaacaaaattacatatgtacttagctttcaacctagcaatcccacttctaggaatctaccctgaagctacatctccaacaatatgaaaatacatatcacaaggttattcattgcagtattgtttataattgcaaaatatataggagaatgattcactaagttatggtacattcacatagtggaacactatgtactatgcagctgtacaaaaagaatgaaaaagatctctacgaactgatatggagtgattcccaggacatactgttatgtgaaaacataaaccccccaaaactgtatgtagtatgctgtccttcctgtaagaaggattggaggaataagaaaatacctctgtttatttgtggaaagaaaatgcaggaaggataaaccagaaactaaagagattggtcacctacagggggcacgtaggagaggggtggaagaaagtggggaatgggaacaggatagcaggggtcaggaggaagtgacactaacaaatgaatgtattattgttacaaatgaacccaatattgttacaaatgaataaaataactacacagaagggggtggggaagaaaagaacaaacctaagtagctgtggaaaagagtatattgactggattctataaggctaatgacagaaaggactgtacataaatgctgcaatctagttagaaatatgtttctcaaaggggaatggcttagcaataaccttatgtacatactagaatgaacaaatgagtacatagattgtagataaggaaagctggatttctcactgttggagaaagaaattataaacaagggaaggttaaaacgaaccagaggtattgttataaactgaggatttttaatatagataaatggatacagaaatataggcatgtgtatatgggtgggatagtacacatacataaacatctcctagttctgtccattgagcgagcacagcacagatgcagttactccccagtaataatgagcatacctggtgcccagatcttcgtctgtaaacattttcttttcttttctttttttttttttttgagatggactcttgttctgtcacccagtctggagtgcagtggcgtgatcttggctcactgcaacctctgcctcctgggttctagcaattctcctgcttcagcctcccaagtagctgggactacaggtacgtgccaccacgcccagataatttttgtatttttagtagagatggggtttcaccatgttggccaggctggtcttgaactcctgacctcaaatgatctgcccactttggcctcccaaagtgctgagattgcacgtgtgagccaccgtgcccggcctctctttttttgagacagggtctggctctgttgcccaggctagagtacagtggtgcgatctcggcttactccaacttccgcctcctgggctcaagccagcctcccacttcagccttccaagtagccggcaccataggtgtgcactaccacgcctggctaatttttgtatttcttgtagagactggatttcaccatgttgctctggctggtctcggactcctgggcttcagcagtccacccatcttggcctcccaaaatgctgggattacaggtgtgagccattgtgcctggccaacatagttctctaatgaaaggaaccagctctgctaaaagtggttgattacaggactgggtcagggcaaattcaggataagcctggaagtctagtggtgccagacaagacatgttgaaataatgcaagagccaacctgaaggaacacctactggctaaagctgaagcaatttgagtaagaaaataatgatagtattggattagaacccatagattaaaatctttacaaatccttactgatataaagacatatttatttcattaactaaccagaggggaagagagagctcttccttccaatggaattccaattaataaatctgagagaaaagaaaaaaaaatagagaattactggccatgctcagtggttcatgcctataatcccagcactttgggaggctgaggcaggtgggtggcttgagcccaggagttcgagaccagcctgggcaacatggcaaaaccctgtctctacaaaaaatagaaaaattaaccaggtttggaggtgtgcccctatggtcccagctattcgggaggctgaggtgggaggattgattgatcccaggaggttgaggctgcagtgagccgtgatcatgccactgcacttcagcctgggcaacagagtgagactctgtctcaagaaaaaaaaaaaaatacaaaacacaaaaatagagaattaccatcaggcagagatcacaataataaatactgcaccgacacaaatgcactgatagatgctaaaattagtaggtgaaagtctgaggagagagagcattgcatagtctcaaagtatctccccaggataccagcttactagagggaaaataataaatttataagaaaactcttcagacaccaagttaactgagtgattggggtaaatatcaccagtaataagatgtatggtatcataaattctttgatattatccattgagaaggatccaccatattttttgtggaattgccaaaaatgcataacttcattccaatcataaaacactggagaaacccaaagggaaggacgttctactaaataaatgatcaggattcttcataagtgtcaaggtaatgaaaaagaaaagactgagaaactcttatagactagaggagaccaaagagaaataacaactaaatgtgaggtgggatcttggatgaaatcctacatagaaaaagcatattaataggagaattggtaaaatttaaataacatatacattttaattaacaatatttaattaacgttagtttcctgtttaagataatttataatatgtgagatgcccacattagtcgacatagtgaggaatataagggaactctgtactatttttgcaacttttttgtaagtcttacattagttcaaaacagagtttttaaaagagctgtatacgatcatctcaataggtacaaagaaagcttttgataaaattcaacacctgttcattaggaatagaataaaattttccttaacttcataaagagtgtctttagaaaacccagaacaattatcatcctaattggaaaaatattagaagcattccttttaaaattcaggaatatgactaggatactactattactacttttcttcaacaccatattagagttattaaccagtgcaataaacatggaaaaatagatatgtaaagattggaaaggtagaaataaaactgccattattatagatggtttacataccttttccctctgaaaactacaaacaaattatcagaaataatgtgaaaatttagcaaagtagctggatataagattaacatacaaaagtcaatcacatttctagagtagagcgactaacaataacaaaggaagctgtcattgacaacaatattattttgtactaatagtaataaatgtaacaaagtatgtgcaagacctaaaaaaggaaaaatttttaaatgaagaaaaactaacaaagaatgaaataaacatactttattcattaattggaagatttaacattgtgaagatttcagttcttttcaagttgatttgtaaattcagtgcatgttccataaaaatcctcgtaagatttcaagggcgcagtggctcatgcctgtaatgccagcactttgggaggccaaggtaggaggatctcttgaggcaaagagttaaagaccaataagattttcatgtaatttgataagattatatgatatttatgtagaagagtaagtggttgaaaacagcagggcattttaagaagaaaagcagggaagaataatttaccctatcagctatcaagacttagtatgaacctatagtaactgagatggtgtggttttgcccagttgaagtcagttaaattttaattttgagatttctgtaaaagatacaagtttagtcttttattatgtatatttgaaggtgttacattttggaaagtgtgtgtgtatgaatgatagctaaatggcttctaagtaaaattcagcatatcttgtagatgttgatagaatagaaggggaaggaatgttttgaaataatgaaaataacatggtatgcaaatgctttgcaagagatttgggaaatgtagatatctctggttttaaggatgatctagattcaagtaatagttcagtaatttcataaaactcttatgacaaaattctggatggagaatattctatgaatcccctagagagtttcaggtttttgtagaatgatgtgaaaaatcttgaactaattagataatctttagaagttacttcacaatctttgtttttacacatacacaggaatttatggtgctttattttttacaagttagtagctaaataaagtatattctaaagttttttattgatgtagggaaatggctaccagtggacattttgagaatattgcagttgttttccttctgaaagagtaaaccgggtcatgacgcagcgagtttcagtcgtgacttttctgggggcatcgcggcgtcccctttttttgcctttaaagtaaaacgtcgccccgacgcaccccccgcgtatttcggggggcggaggcggcgggccacggcgcgaagaggggcggtgctgacgccggccggtcacgtgggcgtgttgtggggggggaggggcgccgccgcgcggtcggttccgggcggttgggagcgcgcgagctagcgagcgagaggcagccgcgcccgccgccgcccctgctctgtatgccgctctctcccggcgcggccgccgccgatcacagcagcaggagccgccgccgccgcggttgatgtggttgggccggggctgaggaggccgccaagatgccgcagtcaaagtcccggaagatcgcgatcctgggctaccggtctgtggggaaatcctcattgacgattcaatttgttgaaggccaatttgtggactcctacgatccaaccatagaaaacacttttacaaagttgatcacagtaaatggacaagaatatcatctttaacttgtagacacagccgggcaagatgaatattctatctttcctcagacatactccatagatattaatggctatattcttgtgtattctgttacatcaatcaaaagttttgaagtgattaaagttatccatggcaaattgttggatatggtggggaaagtacaaatacctattatgttggttggaaataagaaagacctgcatatggaaagggtgatcagttatgaagaagggaaagctttggcagaatcttggaatgcagcttttttggaatcttctgctaaagaaaatcagactgctgttgatgtttttcgaaggatgattttggaggcagaaaaaatggacgggggcagcttcacaaggcaagtcttcatgctcggtgatgtgattctgctgcaaagcccgaggacactgggaatatattctagctgaagaagcaaactgcccgttctccttgaagataaactatgcttcttttttcttctgttaacctgaaagatatcatttgggtcagagctcccctcccttcagattatgttaactctgagtctgtccaaatgagttcacttccattttcaaattttaagcaatcatattttcaatttatatattgtgtttcttaatattatgaccaagaattttatcggcattaatttttcagtgtagtttgttgtttaaaataatgtaatcatcaaaatgatgcatattgttacactactattaactaggcttcaatatatcagtgtttatttcattgtgttaaatgtatacttgtaaataaaatagctgcaaacctcaaaaaaacaaaaaaaaacaaaaaaaagagtaaaccaatttggttactcattttaccaatttggttttgattttgcaagtggttacaactcatgagaggattcttatttctgatcaatatattgtgtttttggaaaggacttctgggaaataattatgatgaagccctcgagcaattgcaacaaaaccaaaaattgaaaagtgggacctaataatacttttttaaaatttattttttagagacaggatctcactctgttacccaggctggagtgcagtggcctgatcatagctcactgcagcctcaatctcccaggctcaagagattcttctacctcagcctcctgaatagctgggactacaggtgcatgcccccatgcccagctaatttttgtattttttgtagagaccaggttttgtcatgttgcccaagctggccttgaattcctgagctcaagcgatcctcttgtcttagcctcccaaagtgctggaattacatgtgtgagccaccactcccagccccagaacaactattattaaaaagtcaaaaaacgacagatgttggtaggctgtgtagaaaaggaaatgctcgtacactgttggtgggaatgtaaattagttcagccgctgttgaaaacagtttggggttttctcaaagaagttaaaactgaactatgatttgacccagcaatcccattactaggtatatatccaaaagaaaacaaattgttctaccaaaaagacataagcacttgaatattcattgtagcactattcacagtagcaaagtcatgcaatcaacctaggtggccatcagtggaggattgaataaagaaaatgtggtacatatacaccatggaattctacacagccataaaaaggaatgaaatcaggatggtgcggtggctcatgcctgtaattcccacactttgacaggctgaggcaggcagattgcttgagtccaggagtttgagaccagcctgggcaaggtggcaaaaccctgtctctacaaaaaatacaaaaaaattagctaggtgtggtggtgcacacctgtggccccagctatttgggaggctgaagtgggaggatcacctgagcccaggaggtggagtttacagtgagctgagattgtgccactgcattccagcctgggcaacagagtgacaccttgtctcaaaaaaataaataaataaataaataaattgcagcaacacagatgcagttggaagcaattatcctaagtgaattgagggaggaacaggaaaccaaataacgtgtattctcacttataagtgggagctaaacactggctactcatggacatagaggtgacaacaatacacactggggactactagagggagagggttgaaaaactacctgttgggtactgtgctcagtacctgggtgacaggatcacttgtaccccaaagttcagtatcacgcagtattcccaggtaacagacctgcacatgtacacccgaatctaaagtaaaagttgaaaagaaaagacttctgttctttcatctttatagtgaggtgttacatgttttacaaacctagttctgataatgtgacaggaatataaatttatcttgaatattattaaatatataagtcaaagatcaacacagtgtttccatgaggtagactttttttggaatctaaataaccatgtgtttccatgtaaatttttatgaatcagggacaaatatataatttgatgtcagagatgtttttgttccccaaaagctctatcttgttcatgaaaaacgaagcccagagaagttatgtacaagttcacagagctcattattgacaaaaccagaatttgaatacaactcttctgattccagatttgctggaaatactgtgaaagaagaattcagtctggtagtattacgtgtggttttaattttttctttgtaactttagtttgaattttatgtgtgtgtgagcatctgcatttacttttaaaaacttttattgtaaaagccttcaaacatatacaaaagtagagaatacaaagcataatgaacttaagtacctattagccagcttattaaaacatggtcagtcttgtttcacctgttacatcccttttcttttactgtctaaaggaaggaaagaagaatcacaaatcagtttatgaagtctgctttctaaaaagtacttaagtgtttattgccaatatcttattttggtcagcaatcaatcacgtactcaagcatacttctcttaccttcagagaaattaaaatttaatcagcaaaactcatcagcctgtacatttaaaatatatgcatgttattgtacagaaactataccttaataaaaagtgagaaaaaaaaatgagacaggaaagagaaaaacatttaaaagacatagtaactgaagaattaaataaccaatccaacacttgaaaaatattacaatgtagcacatgcttaaaagctctctgagctcagggaaaaaagcagcactgtgaatctatagtggtcatcattctatgtggtattgggtaggacaagaagacagccttgcagctggaaattggtgaggacggaggcctcgtgtggaaagagtaaggcacactcagggagagaaccagtgaggtggctctgagcctgtttcagaaggggcttgaggaagaacggcagaggctaggatagttgggaaagcaggatcaaatcagactccagggattggggaaccaattggctgttacagggtggtggagtcaaaaaagaacagaaattttgtgtttggttaattgatagaaaatgatattattaacaaagtaaagaagtatgggaacagcacaagttttttggggatagtaaataattccatttccattgattaaaaatatcaagtttatttttacatctaaactgattcaagacttagctattgtacatgttttagagaaaacaaaactatattttatatctaatcatactttacaacataaaatacagttctaaaaaatattatttgtcaagaaaaatgtaatgttgccatcttttgtctgtatgcatgttttttttccttagattccagtgtagttagtgacgttgtacttcaagacttactggcatatgtgtcctcaaaacattcctacctcagagatcttcctccgagacagcctcagagggtgaacagtatagactttgtagaattggagcaccttcaacctgatgtgttagtccacgcagtactaagagttgttgatttcctatactgacaggtaaacattttgactgcctccttaattttagattatgaaaaaattaagatacaagaccatcttagtgtaccatttggttatcactatatatgtatcatcagctattaaagtatggtatcacgtgtgatagagtaatgccaactaagatactcattttccttttccagaggcagtatacagttatagaggacagaagcagaaaaaagttatgttaacagtggaacaggcccaagatcaacattatgcgcttgtattatggggtcctggagcagcctggtaccctcaacttcaaaggaaaaaaggtaaatacaccaaaaagcatttaacctatttatatttcggtaaatgattaatgtttatgagcccaagatggagaaaatcttaagagacgagacagcatttgaaatacaagtgatcatgattgaatattcttctgcaaatttcttctgttaaaattttgtacctcttgtagcaattcatttatctaataagtcttcattaattaatggtggtgaaataaaggcttaaatttattcccagatatactactttacctttttagtgaagatcttacctccttcaaataatgttctttaaacatttaattctggagaagcttctacaatttttttttcagccagagtactctgataaataaatgctatgattataaggcagatgtcaagggagttaccttaactctttcaagtcacaattaatgttcaataaattacagtttcatatttttattatagttgttttaaaagcatgcactgttagccatccctagaatgttcagtgttaaaatatgacccatgattacatttttctttaaagcataaattatttctggtatattgaattaaatggaattgatgtttcattaaaatagtatagtgtcttccctttgctcttgtgagatcctttagttgtaacaatcaaagacagtttcatttgtggcttatgagttatttttccctgctaaattaatttagagattgattcagtatattattattttttacctgaaagagttaatgtctctccaaacttctgccttccaaatagttatttgtagataggatctatcacattgtctctcttaatcattaatagctatgactaggatttgagataagtctaactttggacttttatgttaagatcaaacagggacagatgtttggttgagcaagctgacaaacatgtatcagtgatagactaactatgatcattgaccaccatagcctggctgagaacatgagtctagtgcatgctacacaagaatgtaggtcacaggtatagtggagctgtaacagagcagattgctccatgtttaatgtgaatattcttttaaaattaatagttttttggttaatagaagagaaattacagttgtctctaggtgactctatggtgtttaggttagtattgaaaacgtatgaatccaggaattaagatgttgttgttctttgtacattcattcatccagccccccttatttgtaaccatcattttaaagttttaacatctacttcaatacctcacatcagtctttttaagataaaaataccaattttgaaggattacttaagtaattctattttcctgattttacttttcttttcaagagaccaaccccatttccaaattcccagcaaagagaatctgattgcccagagtaaatttgattcaaaaaactgtgatcaggaagacagggtcacgcaatacaaatatgagagcttgagcttatttcagtggatgggaaaacagttaagggaatcatttgtgatctgggtgaatacataaagatattcactaccaaaaatgtgtatgttcattagcttagaaagatatatgtaatgtattatttagtttaaaaagtagattataggccaggtgtggtggctcactcctgttaacccagtaccttgggaggctgaggtgggtggattgcttgagcccaggagtccaagttctcatcttaaaaaaaaataaaaaataaaaaaaattggattgtaaaacttcatgtatagaaaatatattatgttatcatataataaatatttttatgtttatataagttaatacacaaaaattttcaagaaaaccctttatatatgatagtatctcattttaataaaaatgtatctataagtacatatgtgcatttgaaaacctggaaatatgcatgtatagcaaaatgctagccgtagttatttctgtatagtagtattatatgtgctttaatttttttctttatacctttagtttgaatttcatatgtgtgtgagcatctgcatttacttttaaaaacttttattataaaagccttcaagcatatacaaaagtagagagaatactaagcataaggcactttttttttttgtttgtttgagacagagtttcattcttgtcacccaggctggaatgtagtggcatgatctctgctcactgcaacctccacctcctgggttcaagttattctcctgcctcagcctcccaagtaactggaattacaggcatgtgccatcatgcccagcttatttttgtatttttagtagagacgaggtttcaccatgttggccaggctggtctcgaactcctgatctcaggtgattcacccgcctcagcctcccaaagtgctgggattataggcatgagccagccaccgcacccggccagcataatgaacttcggtacctattagccagcttattaaaacatggtcagtcttgtttcacctgttacctccctcatctttactgtttaaatatttcacaataaatgtattttattttataattaaaaataaaattaaaaccttatgctttttaaaataaaagaatagttaatgtttggaaaatctagctaacaatgtgagaaaaaatagaattaaatttatactttatatttgtgccaatataaatttcagatacattagagattcaaatacaaaaataatgaaacaatgaatagtagaagaaaatataggcaaaattatttgtaatgcaaaggttggtagggtaaataaaatccaggaacaaaaactattatacataaaaaccaccatgtacaaaattgaaaggcaacaaaaaaaaaacagaaaaaaaattacattgtcagacaataatgcagtaagcaaaagacacatatctatagagttaaatggggaaaggatatgagtaggcaagtccccaaagaagaaataaaaatggccaataaatatatggaaaaattgttcttacaagtaattgaaaacacacaaagtaatgatgatagattatttttcttttaagaaattgattgagaagatatgggaaaacagctactgtcatcagctattggaaatgcaaactggcagaacctttcttgaggataactgacaattaatatgaacaaattgggggtacttttagcccaataattttagctctaggaacttatcataactatgtataaagatgtagctgaaaatgggtttatcatggtatcatgtataattgtgaaaaataaaaaacaaccagagtccctcaaaatagaggtttgctgtaataatttttaagattttggtgtatctggacaatggcatattatgtaatatttaaaagcaatgtagaataatacatacatataaaactatatttgacttattaagtcaatcccaataaataaaatcccaaacaactggttgtccgctaaaatgttaactgcttatttagggtgttgagattatggctgctatatgtttatttacttggcttctcttagcttacttttctaatcaggtattttgtaataagacaagaaagctattttagtgattggttttaagcagtaacttggaatatatgctttagttctagctagtgatgttctgtctttacagatttactgagatgtttgatgattttccaccaaaaaaaaaaaaaaatctttagtgaaagaaactaaggagatgagcaggtgtagtaaattagatttatggcctgaagtgagaaactaaaaagacagctgatgttatcagaaaaatgagtgctaagaaaccctcttttgttttattatagttttgaagttgaatttactaatacagaatatgataatacagataagttgaatttactaatagagaatataacagtaacaaggtctgtgttactgtggctttaagtattagaattgtggccggcgcggtggctcccgcctgtaatcccagcactttgggaagccgaggcgggcggatcacgaggtcaggagatggagaccatcctggctaacacagtgaaaccccgtctctactaaaaatgcaaaaaaaattagccgggcgtggtggcaggcgcctgtagtcccagctactccggaggctgaggcaggagaatggcttgaacccgggacgtggagcttgcagtgagccgagattgcgccactgtgctccagcctgggcaacagagcgagactccgtctcaaaaaaaaaaaaaaattgttactgagagttaaaaataagtactattgtgtctaaatgctttttgttctagaaaagttaactaagataactaaagtattgaaatatgagtgaaatattagacttgggttcatttcagtgtcctttctttaacaaaacaaaacaaaactttgcctatagatagatacatgagaattttctttacagaaagcagttggttattataaatgatgaccgttcaggagggcaaggaatctttagaaaatattttattaaaattatctctggtggcccggcgcggaggcttatgcctgtaatcccagcactgtgggaggccgaggtgggcggatcatgaggtcaggagttcaagaccagcctgaccaacatggcgaaaccctgtctctactaaaaatacaaaaattagccgggagtggtggcacgcacctgtaatcccagctactcaggaggccgaggcaggagaatcacttgaacctgggaggtggaggtttcagtgagccgagatcacaccactgctctccagcctgggcaacagagcgagactctgtcttggaaaaaaaaaataataataataatctctagcatgcttctgttgtcttaatgcaccattcatattttgtctctgtttacccaaattctttagtgataaaagattagtattcaactgacttaatcagatcaatctatttaatctgatactaagcctagattttttttcctttttggtgacttttgtttttactgtttttgtttaaggttatatttgggaatttaaatatctttttgttcagcgcaattacacactagaaaacctagaattgcatacaacgccttggtcatcctgtgagtgcttgtttgatgatgatataagggcaattacatttaaagcaaaatttcaaaaaagtgcaccctcctttgtgaagatatcagacttagcaacccacctagaggataagtgttcaggtaagatttttatatacataaattctgctatttttatttcttttgaaacagagtcttgctctgttgctcaggctggaatacagtggtgtgaacacagctcactgcagtctccacctctcaggtttaagtgattctccccgctcagcctttcgcgtagctgaggagggaagggaaggctagtgcataccatcagtgcatgccaccacacccagctatttatttatttattattttggcagagacagagtctccctatgttgcccagtctggtctcaaactcctggactcaagtgatcctcttgccttggactcccaaagtgctggaattacaggcatgagccaccacacccagcccactgctagttttaatataagcaaaaaggctaccacttgtggtaaaaatgtataagtctatataaaagtgaaatataaatctttgcaaatatctgaactagattccagtagttttaggaactatgtgctaggaaccagggacaaagagcaaatacctattttttattatatgacaagtgggagcagaaattcagatccttactttatcttggccaaatgccagattaaaatgttactagttgggttaattcacatatatgtgtaaatatgttttccaatatatgattgaagggttagcattgttatatcataaaactatgctaaggagaatacaggcagaaaacaaagacaatacctctcaaaaaacccaacttttaattgaatacagagatttcattctcagagaagaactccttattcttagttctacactgaaacatttactaataccagcagatagtttaaattaataatatttctggaaggtaaacacagatgatagaaaatttataagcttttatactataaaaatttcatactattttcaaaaatggaagttgcctatggtcataaaagactctagatttatactaactggtaaaatcttggtaatgttatagcatcatgtaagttcctaagccagttttatatttatgtgcccctcccgtgctctgcttctccaacttcacagacatatagaggtggtcaccacaggaaggaatgccagacacagttgaggggctaccttactttgcagagacgtttagtttggtgccatggagaagtcaactctgttatttactgcttacacaaaacagttatctgctgggattgaagtctagaattaggtttaaaaataaaaataaataacatcatggacaacaacaaaataggaggccaccacgctgatgatgaaagattctcaggctatagccccacttgtttgaggacgcagccaggaattgtgcatgttcttggaagtcctggaggtgtgctcctcattagcaagccatgccaaaactgtgccattaaaatcagtccttcagaggctttgttcacagaggcctgtttagcctttttcattctctttatgttcagctatgagggctgaattcatagtttctgtcatagtgtatgtgtttttaagacaaaaatggagagagaatatgaaaacacaagcaacttttccctaacctattttatagttaaataaaaggagaaagagagatcagcatgggagcatttcctagaagggtctgcttgctcaacaaaagccagagggggatgaggctaggcctgagtccttgtaaagaaatgaagacgcttacccagtacctcatcttaccgccagcagaatttcagtgctcagcggagtgacccccttgaaagcaaagtccacattcagcgtgaccttttaattcttttcaagagttgtgtaaatttacaaaatgataggattatgtgaacattcttttaaaattattgaattattacgaattttttaggctgggcagggtggctcatgcctataattccagcactttgggaggccgaggtgggtggatcatttgaggtcaggagtttgagaccagcctggccaacgtggtgaaaccctgcctctactaaaaatacaaaaattagccaggcatgatgtcgggtgcctgtagtcccagctacttgggaggctgaggcaggaaaattgcttgaacgcaggaggcagaggttgcagtgagccgagattgcaccactgcagtgcagactgggtgacagagcaatactctgtctcaaaaaaaaaaaaaaaaaaaaaaagactttttgagtggagggaggagagcaagggttgaaaaactaactgttgggtactctgcctactacaggagactacttgggtgatgatatgcccatgtaacaaacctgcacatctaccctctgaatctaaaataaaaatcgaaatttttttttttacatatttttttaggccagacacattggctcaagcctgtaatcccagcattctgggaggccaagaagagtggatcacttgagcccaggagttggagaccagcctggtcaacatggcaaatccccatctccacaaaaaaatacaaaaattagccaggtgtggtggtgtgtgcctgtagtcccagctactcaggaagctgaggtgggaggatcacttgtgcccagggaggttgagactgcagtgagtcaagattgcaccactgcactctagcctggacgacagagtgagactgtctcaaaacaacaaaaaataataattttgtagtgatttaacatgtctttggaaagatgtggtattgaatcttctacagtttgttacatattcgatcgctacgcactcctgctaactcatgtagggatatgtgacacaattggaagagatgatgaaaccgtctttgggcattgaaagactaaagcaaatgaagttaagaacagaagactcatcattaactggactctgaaagagataaccagaaaacagtaggagactagagtgattagttcttgacctggagtgttcttacttctaagtggatgaagaagaacaaatttgaaggcttaaggcttaaagaagcctttaaattgactatggagaaagggagaataatgctcaagaaaactcatagacctcaccagtacacagtaagacaaaagtaaattaggaaaaaataatgtctgggagatagtagactttcagtatttgtttactggtgaatggatgagccattagcagtgaattatgaatatgcttgaggtttcttgtgagtcacctgagaaacgattaataaatgagaactttttataacccacagccagagtatatagatgataatggtgagcggaaagttggaaaaaagtttaaaagagaacaggctattgatatttttacgtagagagaagaagaaaagttcacctcctatttggctttttttttttttttttttgagacggagtctcgctctttcgcccaggccggtgtgcagtggtgtgatcttggctcactataagctctgcctcctgggttcaagccattctcctgcctcagcctcccgagtagctgggactacaggcgccagccaccgcgcccggctaattttttgtatttttagtagagacagggtttcaccatgttagccaggatggtctcgatctcctgacctcgtgatctgcccgcgtcggcctcccaaagtgctgggattacaggtgtgagccactgtgcccggcccctatctggcttttcaccatgatcagtttaaaagaagacagggcaaggagagagggcatgttagctagtttcaagtattcgaagggatttcttctaaaggaggtattgaacttattttgcctgattccagaggatggggaaggaaggaaacatcacatgttcagccaaattagccaagtaaacctgctctcagttgcagccagacctccctgcccttagattctaggaaaatagtaaagaagacgaagaacaagacctcagtgtatccttttactacaagtgactgtaaatcaactataaaattagccatgtttgtaaattaaagttataattttggcccaataatttataacatatctgtttgttgtttgtaggagtggttctaattaaagcccagatttcagagctggcatttcctcttacagcagctcagaagatatctctaaatgctcacagttctctgaagagtattttttcttctcttcccaacatcatatatactggctgtgcaaaatgtggattggaactagaaacagatgagaacaggatctacaaacaatgttttagctgcttgccatttactatgaagaaaatatattataggtaaggcaactaagcaagccaatttgatggaaaataattattatagatctggaaaaactagtctgtaaactcttactttctaaaaagaattaactagagctagtcgaagagaataaaattttccctgagtgatagatagctatttatggtagcaaaaattacccaggaatcgttataggaatttcttaaagataggaatttcttaaagcagtaattgggagattttattgtcttcaaacagctgtaccaaagaaacattttccttggtttactttttaaccaaaatctaaatgctcataaataactcattttcccaccttaacatataattagaatttaaaggctaaaagtatcatatgatgtcacctctgagttgttgtggaagctagtaagacatttaagctgttttcccacctttaccttagaaattaaagccagcaaataaatgttgtatggtaaaactgctaatcagctcagtgaaaaacacattgttttttgaataataggtagtcaaaagctcagacatttttctctttaccttataaattacatgtgtttacaaaatagcactcagtgttttatgctccttatgattatttctaaatattgcggtatctaaaaactaaattcagatatattccacatgttatcatggcatacttcaagaaaagttatagaagcttaatttgtaaaccttatttctctttacagatattatgtttgttataaataagtgaatgaattttgctattactgtgaaagttgcttttgtggaaaagaagattgaattaagatgtatggtaggctgggtgtggtggctcatgcctgtaatcccagcactttgggaggccgtggtggggggatcgcttgagcccaggggttcaagaccagcctgggaaacatagggaaaccccatctctaccaaaaaaaaaaaaaaaagctgggcatggtgacataggcctgtagtcccagctacttgggaggctgaggcaggaggattgtttgagcccaggagatcaattgttacagtgagctatgtttgcaccactgcactctagcttgtgcaacagagtgagaccctgtctcaaaatcaaaacaaaaaatgcatggtatgtaacaaacaacattgatttattaatagttaaggcccctcaaaagtatgtataggtgacttatttatatcattccaaatgtttctattcaatataagcatttattggacaaaaatactgctcaatactattccttatggggaggagggcctttgaatctttagtttacaaaatgactgttcaagagaaggacttcacagatcagtatcacctgattatggcataactagtatgaggtatttaagatctcttcctaaactataccacattaaagatgtagtgctagtttgttgtcttactagaatgttgaatggtcatgttaaggcaagaattattattttttatttatttaaaagccttttttttttattttttgagacagagtttcgctcttgttgcccaggctggagtgcactggtgcgatctcagctcatcgcaacctctgcctcccaggttcaagtgattcttctgtctcagcctcccaagtagctgggattacaggcatgtgccaccacgcctggctaattttgtatttttatagagacagggtttctccatgttggtcaggctggtctcgaactcctgacctcaggtgatccacccgtctcagcctcccaaagtgctggaattacaggtgtgagccaccaagcccagcctaaaagcctttaaattattagagtccagattatgtggtttccttggaaagaaaatattgaaattaacaaactcccttcaagttatcaagtatgtgactccaaaatcatctatataaatcaatcagcaaactgaataagagaaaactctcattgattatttttctaagactcagtcaaatatttattaggaatccacgtatgttcacatatcacatgtgtactgtggatgttatactagttgatctaagtagacttattgtgcccaagaagcttggtagtccatttaagaaacacttaatgaacatttgtgtggcacaacagtcccaaactatgagtgggttgatcatattttacattggttgtaacttggagctgattttccaatggaagcaacattagatattgcaatggagtctcatacgaggccacagacatttattaaattaacatgtagatagcatagttcctgctcttcaagctatcataaaactcaaataccatttttaacaatgtttctacagaatattcagatttacatttttggaatacaagaaatacatttatttttctgtactggaagcaaaaaaccccagcaggtcaaaccacaattaaggctcctatttaggcagcactaggaaatgtttgggtctctcaagaggttgtaatcaaggtgtaggctggggctgcagtcatctgaaggcttgactggggctggaggattcatttccaaagtggctcattcatatggctgacaagttgagttcctcttcacttgggtgtctccacgggctgcctgaatgttctcacaaagtggcagctcatttcctcagagcaggaaaggcaagaaagagagttccaggtggaagccagcctttttgtgacctagactcagaagtcatgtggcatcacttctatcaaattctgttcatcagaagtgagtttagctgtgcgttggagagtggattagaatgaagctagtgcagagaagcggtaagaggctgttgccttattttggaggggagatgatggtggcttgactagagaggaagcggtaggaataaaaagaagtggacagatttgagaatggtcggaaaatagtttgcaagatgtagtgattggtaggtaaagagagagcacaggtacattgcaaatcattgacagttgggtgaacaataagattatttattaaaacaagtaaccttgggagaaatcttgatcatattgagcttgagttcctgagaggtaacaagttggaaagtggttagatgtaaagaaatgcaatttgcaagagaagtctgggctaggcttataaggttatctgtggtgattgaacttttccttggtttctgcaccctgttttgtttttccttcttaatcttcagtgattacctctcataatggattattcttactagcctataaagacagtcccatatttctcttattaaaaaacaaacaaaatcatccattaacattacatctccctcttatcccttcgtttttctattctgttttatacccagccaaactttgttaaagagttgtaaatatactctctctcccctattatgtcttcagtttcacttcagttattccattctactcctaccatgctgcagaagctgcttttgtcaaagttacacttttgatgttgcctgaggcatggatacttctttcctcgctctaactgctctcagttatattcagcatgtcagtccacttcctccttcttgaaacagcctcctccttgctttctaacctgtctctcaggcccttctttctcagccttttctaccccctctttaaatgctggggttaatcttgagctctcgtctgtgtccttcctcttattctttctgtacattctgcctggatgatcacagctgttttcgtatttgtacttaacatcttcaccctgattttctcctccaggctccagtagtcaggtatcaaattctttgcttgatgtccatctcacatttaaacatacccacaatagactcttgtttttcctaaaaccacactcaaatctagttctcttcgtttttatactttctggaaaatggcacaccatctacccaattatttaggctggaaacctgggcacaatcgttgcatcattttctcttccctacctcccctatctaatctattagcaagtcctaggaattttcattcagaactatatcacaaattcatccacttttttccatctccactgctaacatcttagtccagtgtatctcagcaggggcattgttgacatttttctcaggacagtttctcattatgtaccatatcccacatgctgcggggcatgtggcatccctgtttaccttcccctagctgaacctcaattactgtgaaaccaaaatggaaagtcagtgcctgctggtctggaatcactcaggcctcatctgagtccctactacctattgcgcaaaccagcacaccagcagtctcttggtggggctcctcctggccttgcctcctcccctttattctccacccgttggcagtgtgattaccctttgcttcacccatcagtcatctccttgtgcttgtttcctctgcagtctcatctgctgccactcccctgtcgtccagcactctagccacgtggccttctttcagttcttcagacattttgatttttctccttaggatgttctcgaatgtcttccctctgtctgactccacaaggctggtttcttcatgtcttagattaaatgctgctctatcagagaggcctttcctaaccacccttctttattttctgttatagtagcctgggtgtgcttactgtaatttgtatttgcatactgtcttttctaaaaaacatttttactgaagttaaaattcatataccatcaaattaatcttctgaaatgtacaattcaatggctgtagtatattccaagggctgtgtagctatcaccacaaccagttaggacattttcattacccagccctttacaaagcctcatactcattagcagtcactctccattccccatgcccctcaacccatggcaactacgaatctgctttctgtctctatagatttgtctgttctagatattttatataaatattatataatatgtgatcttttgtgactggcttcacttagcatgatgttttcaaggtccatccatgttgtagcatgtatcactacttcattcctttttattgcaaaataatattttattgtatgcacataccacattttatttatccattcatcagttgatggacaattgggttgtttctactctttggctattatgaatgatgctgctgtgaacatttgtgtacaagtttttgtgtggatatgtgtgttcatttctcttgggtatatatctaggagtggtggaattgctgggtcatatggtaactgtctgtttaaccttttgaggaactaccaggctgttttccaaaattgctgcacaattttacattctcatcagcaatatgagggttgtaatttccccatattcttgccagtacttcttattccgtttttctttttgttgcatgtgctttcgggtcatatctaagaaaggtgtcatttctaagccaaggttatggagatttgctcccgtattttcttctaagagtttagtagttttacctcctacatttaggtttattatctactttgagttaagttttgtatatgggataaggaaggggtataattttattttttggcatgtggatatctagttgtcccagcatgaatttttgaaaagactgttccatccctgtttagtcatcttggcaccactgttgaaaagcttattttctttcttcttctttttgtagagatgaggtctcgttgtgttgcccaggctggtctcaaactcctggcctcaagcagtcctcctcaccttggcatcccaaagcgctgggattacaggcatgagccaccgcgcatgcccaatttcttcctatccctctacagttttacgttccttgagtgacggaaccagatttgtctttttcactagtgggtacccagcacttaccacagtccatgatagatactcagtttgtatttgttgaaataaataatggagggagagagaggctgaggaaagagtgtagagtgaaaagaggaaggaacatagagtcatcgtgtgaataaagggggaagtgggtttttagggggaaaatcagtagttatgttttagctctgttacattaaattcccccgctaatgagcctgtttctgaattctgttctcaatttattttttaaaaatcaatgtagttataaaataggtaccacatgccatggttaaaatgcacactacataggaggttataaaacaaagagtgaaagtctccttcaccatccaaccctctcccaccagtgctgcttccatgctggtgagaaggttttttgtatgtccttccagtgatttattatgttcatcccagcacatgtgtatccctttctttagaagcatgtggacagaagaatattgttcatattgttgttccctagagtctatcctggtgctccttccctaatagcacttgcaaatgttcttcattctttttatcagctacatagcattaagatgtaggatgcactgaaaattgttaatccagttttattgatatgcaaaacagtttatttctgataggaaagaattcagttgaaaaaagtaacttgaaattgtgattgtgaaatatgtgattattatttttattttcatttctaaaaataatttataaaacagtttaatatatttttatattagtatctgaaatttaaaaatggatatagaataaataaaatgtagtaatttatcatttgaagctcttggggaaaaaaaaacctttttttccttctaggatgtcacagaacatcctagagttgttttaagcattaaaattaatcctgcataaaaaccaagtgctttttggaattatttttcatttaagcatttcttttatttgaaaatctttttgaaggtcgtgtgttgtttactcttctgtaggccagcgttaatgactgccgttgatggaagacataatgtttacatccatgtagaatcaaagctgatagagaagattcttctcaacatttctgcagactgcctcaacagagtgataggtaatatatcagtgtgccatcaagaagttgttttattcaggagtataaatggtatatcagaacagaaagagcactgtactttaaattaagagcttttctgtccatatgaaaacagaaggataatttagcttaagtgaaatataagcctatgtaagttagaaggttgacttgctttacacctgttagtacatgaacagcgggaggcacctaatttcttcttaacctacatttcctgttggtaagcaaaaactattttacttaactctagttttataagaatgaagtcaatgagtgtatgacataatatatatgaagatagtccagtgtcagtggaatggatttgcaagatcttcaaccatgatgtcttagttgtcagtggctaagaataaagcaaagataatatatttgtcaggtattcaaactccattcctgttctcattagcctcagatcctctaagctgatgagctaatctggttctgtgattgctttatctttcaatagtagattgttttttgtgtttttttttagttgggggtgtctagtaattttgagttgaatgctgaacgttgcatatattaagtagaacagtacaaactgaggtaaatagtagttgtacctggaaacaggcatgcctcttctggtcctttactggaggtgaggggtgagcaggatggtcagccttgtcataagttgagttggattcaggttttgttgtttctctggttaccttcaggtcaccactggtttcaaattatcttgtgcttatggtgggaagtggttccccagtattcctgctccaccatcagcatagccctccactctgcacctgggcctcagagaaagtttctttccatattcttgcacctccccaagttgcacaagcttttgttggttgttatttggtgcatcctaacctggtgggtgggagcagggttgttcctctttgattctggtccagccccagtcttatacggatgttgcacatggcgctttcttggtagccctgtcccttatgtggcatggcagctgagctctgtcttgtgcctttagtgggtcttgtgtggtcctggccctgccccagcagtaggggaccactaatggtcttgacccagggtggtttttcagtcctcccccaggatggaggtttttttttttcttttttctttcccccatctgtactggttcctcacctgtaccctggggcaacaggatttggtgtccctcctccagcaattgaaggcttttgttccttaaaggggaggccagatggtgctttgtgttttgtagttggaagctttctctgatgtcttgccctgcccccagtcttatgagcacctggtggaggtgagacgtactatgtggaagagcctatgaggatgcagatgttccttatgttgctgacactggcagttcattggctttttgcaattaatttattaataaaaattaatcacattcttctttcctgcctgtatggaggacctgtcttcttcccaaggcctgccccaagggaacctgtgctcctgttccatctccctggaggcacctgtctccttatgtttcagtctttttggctgttttacaaccttggttctcatgtgtattcaagaaaatgatgattttatatttattcagttttttccagtaactgttagggtaggagccactttttccagctttctacatcttaattagaagcctctctccgttttttcccccattttctttatttcatttttattcttttggctattttcattccttttcttaatgttacttatatattttcagtgttatctcttctttttttttttgagatggagttttgctcttgttgcctagactggagtgctgtggcgcgatctcagttcaccataacctctgcctcctggattcaagcaagtctcctgcctcagtttcccaagtagctgggattacaggcatgtgccaccatgcccggctaattttgtatttttagtagatatggggtttctctatgttagtcaggctggtcttgaactcccaacctcaggtgatctgcctgcctcggtctcccaaagtgctgggattacaggcgtgagctgccgtgtccggcctatctcttcttttttgcataatgtaaattagtctttatctcttagagaagcataattctcatatcacatatacttcagtgttttgtccattcttgagacaattaaagttgtacttcttggcattaattagattgtgatcataagtcaaaatgtcattggtcataaagtggtcatcagaccatgcagactattactaatattggttatgttttagtttattgcagtgaaaatacaaaatttaaaagttattgtagagaattatcataccccccaaaatatgtcattggtcctccaggactctgtagtccccatccaagaaagactgtgataattgtcaaggggttagtacagtctgagcatggtcgatggtgctctgtcattctggtattgaacaacctcccaaatgtcttgattacatgtcctaaaaaagtgaggggaagagtgtaggacaaatgcaaaataaaataacacatttagctatacttttagtattttttattattgagattcaatatttaagtgaccgattcaagattcttttatataaaaaatgaatatatgcataagtaactgtgataagaactgtggatggataagagcactcgtctgatgtactgcagcataaccagaactgctgttggtctgaacggtgtgttatctgggcctgtttcttgtgtcagggggatcacatgctgtcactctggagtgcctcaatagcttgtaactagaaagagaaggtatagaaagagtagtttacttacctgtttatttatttagaggcagagtcttgctctgttgcccaggctggagtgcagtggcacaatctcagctcattgcaacctctacctcctgggttcaagcaaatctcctgcctcagcttcccgagtagctgggattacaggcatgtgccaccactcccggctaatttttgtatttttagtagagacagggttttactgtgttggccaggcatgtctcgaactcctgacctcaagtaatccagccacctccgtctcccagagtgctgggattacaggtgtgagccaccgctactggccgggaggagaaatttaaaatgggtttgagacttgaggaaccaaaagaaacaatgaaaccattcaatgtgtgtgctcctgtcaagctagcagcgatcttgagagctctgtgttttcgtcttctgcagttccttcctcagagatcacctatgggatggttgtggcagacctgttccactccttgttggcagtcagcgcagaaccttgtgtattgaagattcagagcctttttgtgttagatgaaaacagctatccattacaacaagatttctccctcctggatttttatcctgacatggtaaagcatggagccaatgcccgtctctgaggccagaggaagaaattgcaggcatttcaaggaagaagtactgaaatgatttgtcttttgaaataaatgaatgacagggcttttgctttggattttttatgaaatatattttacaaagagaattgcactagatatataaattaaaacttttttctaagaaaatcctgtgaggtttaaaaagattgtttttgtcttttggtttcttcctttcttctggagaaatgatctaccagtcaaggcaatatgtagcagatccctgggaattaaaggtttgcccatttgttcactgtatttagtccctgctacattccaggcatcgtactaagtatggggaaccacagagaagacactccttcagaaactgctgcagtgctttcgcttatccctacctaaaaaaccgtcaatgtgaaatcatttccttgattataactataatgataatggattagtttatataaacctatgtttagacaagttcaagacaagcgtgtctttctataaaaagtattgaaagtgaaggaaatgagatcatgtttcaatttattaaagcagggaagagcgttctgtggttagttcgtgtctaggatttgagtgccttactgaatgtatttaccagcaaacatgtagcaatctgttctctcattgtgattgtggaagaagctcatgtaaaatgatagtcattaatgaggaagtatggcgtggtacttattctgtaagttcagagtatgctgagtgttaatagattgtcatattgcctgaaaataaattcatgatgacatgaacaagcttcttttaccctgtgtatgtttttaaaaattcctttggttcagaggtggttgttgttttttaacttggcttccctaagaacgaaccacaagagttttgtgattctttcaaaaataatatgccaaaatgcctttgtgggagcacacacacacaaatgcatgtttctgtggagaaggatccatagctttcaacaaatcctcagagggttctgtgaccaagaaaggtaagaacaaggctttaactgatgagtttctttgtggggtagataagggaattagagcaaatgattgccaaagttttgtctagcaactaataaggtgggtacagaaagaattgactccattttgtatctagagagactggaattcaaacaaaatcattggctcccttcaatgattcgttgaatgggtgatgaaacttgagcctgtagttgacgccttctaatctgtgctctctcaactataaccacactaggcagagatttggaattctgatataaaatctgcccagtcaatataggccaaccaagagagctgttcgcttaagtgtgcccttccccacttcgtcctcaagtggagacctaatccctacatcaaccagaacataatccccaggaagagatggctcttcacatcctattgggaagaaatctttaaaccatttcaggtgagtcaacagatcacaccaacatctcttcacagttgttggtatgtatttcattaattaacacatatttccaggagcccttatttaggttgggaactgtttcctccagtcctgaggaatctgagctatctacagaagttatgagctatttaagtgggatcaggatcagcccattgctcctgctatggtctgaatgtgtcctcccaaaattcttacgttgaaacctcatctctgatggcattcagaagtggggcatctgggaggtgattagatcatgagggctctgcccttgtgaatgggatcagtgcccttacgaaagtggcccgagggagcttctttgtccccttctgccacaggatacagccagaaggtgtcatctttgaagcagagagcaagccctcactagattctcaattttctggcaccttgatcatcccagccttcaaactgtaaaaaataagtttctgttacttataaattgcccagtctgttattttgttatagcacccagaatggactaagacaccttctgtgtgtattctttacctgagttgacaagtaagtgtctttattctgttatgttttcataaaactcagtggggtagccagagtgtcatccagcagtcccatatctggcagtcttatggtgggcatttcagggagacctcattcttcatcttctgttagttcagcttgcagggacagctctcctatttttagagaatcatttttatttgttagtcacttagtttccccagaggtatcctttttctaacagcgttagaggcattcacctttctccccactagtaagatctgtgctgtttcattttacatcttttttttttttttggttgggggaaagggggctgatcatcaaatgagttgacaacattgggtgcatgatccaccctgcagacgttcgctgaatgtctaccatgtgctaggcactggaaatgcaaagacacaaatgtctgccttctgtaagttcacaggcaagctggtgaagaaatatttaaacaaaattatatcagcgccaggattaaatctgtgtggaatacagagccaaggcaaaagaggtaacagtaggatgggtttgttagtcatgactcttggttgcaagtgataaaaacccaactcagagtagcttgagcaaaaaagggggacttgattgactcacataaatgagggtagtaccagcttaaggcacagttgaatccattggcctaaattacctggttaccccaactccctaatctttctttctttctttctttctttctttctttctttctttctttctttctttctttctttctttctttctttctttctctttctttctctctttctttctttctttctttctttctttctttctttctttctttctttctttctttctttcttttttttctttctctctccctctccctctctctctctctctcatcagaagaggtcttttacgctgttattgcaaaagcatagatgtttctacagagttttgataggataacattttcacagtgattatgaatttacatcgtccctagaattctaaactactgggatctgaggccgtaagttgtttaagagtattctgacattaccttagattcagcaaaacttgaatagttgatcatgcctttcttagaagaaaatatctgtaatttctcagaacaatatagaatgagacagaaaaactaaccatccctatgtgccttattttaagtgatatatttgtatcctgatgggtttctaggtgttggaacacaggtcatgaatcatagaacaattagaataaagtgttcgtctttatcagtagcttaattctggcccttgatttaatgtcaacaggggagaaatgtgtgagaggggatgaggtttgccaattaattgtcattatgtctttggaggtcttgaacctgatttgttattaagaagtgaattctacccacttaaggcatacatttgctaaaggtgacctctctgcttccacgttgttaagaaatcgtgatttttttcaaaaccatcatcagctttacagtttttgaggaaagatctagaagcctgttaaaatggacttaccaggcagggttcagcccaggaaacacaagccactctgggtattctaaacagagagagattaatgtggaattcaggtgtttgcaaaggtattggaaggctggaggagcaggcatcagtctgagctccaggaggctgccacgtgaacggtggattcatgaaaacatcatcattggctgcaatcttagactgaggatgcagctgctggcatcccagcaactgactctcaagcacatggaagctgggagttatttgctgctgcccaaaactcagtccccacagctacacttgccaggaacagtagcttcaggaagatagcctggatttcactcatcttccatattgcacatgtgtgtgtgtttcattgatggaacatgattcacgctgagagctttagctgcaagaaagtttgggaaatatgtcttctctgaggcttttggtctttgcagttcaggagcagttaggaggtgggactggttggttgcagagtgagctgatttactgcacttagtctagcttattaaaggatcagcttataaacaccccaggtaatatcacaatacataagtgctacctaattactgtgtgggtctgttaccaagaatgtctaagtcaagaaattgaagattgtttccttcagattctgcatcctaatgtagaatctttcctattagagtataagtaaattattttggtgtgttatttaagaatatttgtgaataggcttaattaaacaccatgttaagaaattataaacttaaggccaggcacagtggctcacgcctataatcccagcactctgggaggctgaggcgggcagatcacttgaggtcaggagtttgagaccagcctggccaacatggtgaaacctcatctctactaaaaatacaaaagttagccaggcgtggtggtgcacacctgtaatcccagctacttgggaggctgaggcaggagaattgcttgaacctgggaggtggagcttgcagtgagctgagatcacgccagttcaactctagcctgggtgacagagtgagactctgtttaaaaaaaaaaaaaaaattataaacttaaaaaaaaaacgttttcctttaaacaaaaacgcatgttccttgttttttgttttgttttgttttgccttttttgagagacggtcttgctctgtcacccaggctggagtacagtggcacaattatggctcactgtagcctctacctcctgggcgcaagcaatccttccacctcagcctccctggtagctgggactataagggcagaccacaacaactgattttttattttttgtagagacagggtctccctacattgcccaggctggtcttgagctcctgggctcaaccgaccctcttgccttggcctcccaaagtgctaggactataggcgtgagccactgcaccaggccgtttctttttttttttaactttggaaaatatggatgaatgaaagtgagaaaagtaacccttctgttattctaccaaccaaagctaattgctgccaacattttaatagatattccttcagttgttttatgcatgtatgattttgtacatgtgtctgctttaaaatatatagtctttcaatgttgcccaggctggactcaaactcctgggctcaagtgatccatcacctcagcctcctgcatgtatctacatcttattttattttatttttagagacattctgttaaccaggttggagtgcagtggtgtgatcatggctcactgcagcctcagcctccctgggctcaagtgatcctcctgcctcagcctcctatgagtagctgggactacaggcatatgcctccatacctggacactttttgtattttttgtagagacatgtttttgccatgttgcccaggctggtctaaactcctggcctcaagtgatcccctttgcctcagcctcccaaagtgctgggattacaggtgtagactaccacgtctggccaacattctcattgatagtctttgcacacatctttcattccttctgggaatttattctaagaaaatagaattttggggtcaaagtacttgtatgtatgtatctgtaccaggaaaaaagcagaaattccagtatcaacagataacgagagccacgcagggtggtacatgcctgtagtcccagctactcaggaggctgaggcaggaggattgtgtggcatgagcccaggagttagaggctacagtgagctatgattgcaccactgtactccagcctgggcaatagagcaagaccctgtctctgaaaaaacaaaacaaaacagataaccattgttactattttgttgaacattttccagataccctgatagaagacagatctgtgcatgcacatacacaattttacataaatgggaccattccatataggccagtatctagtgtgtactttttttactccacaatttgccatatacgtctttccaaatcaatcaacatagattaaatcatatcaactacacaggattccatcatttgtgtgtgctcttgaatcctacttttaaaatgttctcagaaaggttatcctgaaatatattcctatcagaagttttccacactctctctaaactgaatggcataagtgaaagactagttgttaggtttaaaaaaggttatctgttttaattggaattttttttgaggttttctttttcttttttctttttctttttttttgagacacagtttcactctgtcaccctggctggagtgcagtggtgcgatcttggctcactgcaacatctgcctcctgggttcaagcgattctcctgcctcagcctcctgagtagctgggattacaggtgtgcaccaccatgcccagctagtttttgtatttttagtagagacaggattttgccatgttggccaggctagtcttgaacttctggcctcaagtgatctgcctgcctcagcctcccaaagtactgagactacaggtgtgaaccactgcgcccagccttaattgaattattttattgctaaagtgattgtacatttgcttcatatgcttatcagtcatttgcagtttgctttttcatattttaccttagaccatttttatgtgggagaagccttttattaaattagtatgttctccttataaagttagtaatttttaacatgtgttgcagacatttttcccaagcttgttatatatgtttgacatgcagaaatcataaatatttacgtggatcaacccatcaatctttttctttattgtttctagattttatggcatgcctagatagcttcttttctactataagattatacacattttcttcaaaaaattttctgaaacatttatgattgttatatttgtatttaaatctttaattatctaaaatttagtgcatggtatgaatggatctaactgattcattttcctaaaatggtcagctggttgtcccaacactattgatttctttctttcccatcagtgacatagatgtgatctttattataatatgaaattattattcctgctagcattacctgtggactttctagtctgtttcattgttctatatttattgctgagccagaaccatacagttagaattattataactttacatctgataggaaaagtacccccatatttttcttcattaaaattgtttttctcagacatctttgcccatctgttcttttttattccccattaagagtatatgttgcagtgttttttagtatattcagagtgtgtgaccatcagcacactcaattttggaacatttcatcacccccaaaagaatcatccatagttacattaactataccaccccacagctcttccttaagaggagctaacagtcgctcctccatacccaccccctttcccccaaccctaggtaaccactcttctacttagtggctgtatagatttcactattctgacatttcacatgaatggaatcatacaatatgtggtcctttgtaactgatttctttcacttggtatagtgttttcaaggttcacacatgtagcatgtatcactacttcattgtttttattgccaaataatattccattgtatggatataccgcattttatgtatctattcatcagttgatggccaactgagtttttcccactttttggttatttttaattgtactatcatgaacatttgtgtgcaagtctttgtgtggatgtatattttcatttctcttgggtatgtacccaggagtggaattgctgggttgtatggtttaaccatttgaggaactgccaaacttttctaatgcaggtgcactattttacattcccatgagaatgcattggagttctgatttctccacatcctcaccagcactttttattattatctgactttttgattatagccatcctagtgggcatgccatctgttcttgagataagtttagaatcatttttatcccattgatatttttaatgagattgctttgaatttatggatcatttggacatgttttcagtggttaaggcttactatttaagaagagcatgctttttcaattaataaagtattctttaatgttccttagctttagctttatttagcagtccacatttaaagggtattaactatggaaatttttttttttttttgatacagggtctcactctgttgcccaggctggagtgcagtggtatgatctcagctcactgcaacctctgcctctcaggctcaagctatcctcccacctcagcctccttggtaactggggctacaggcatgtgccaccacacctggataatttttgtattttttgtagagatggagttttgccatgttgcccaggctggtctggaactcctgggctcaagcaatccacctgcctcagcctcctaaagagcttggattacaggtatgagccatcagccagtttttttgtttttttaaatcattgatttcaactatgctctgttgaatcccttttccatcccctcatgtctcacatgcctcacataacttcccaggcattgtgttttagaaagtctggtattgtttaaattccaacctcattttgctcttctccagagcatgtccagctagtcactaaagggacttggaatggggaggagataggtgcacccttcctttcctttgactccagctgttggagctggagggagggcgtgaactggcaccgaggtgaattcgaattctgctatggtaaaaacagcaccatatattgaatgctgattcagagcatatacagccttctggagaatttgtcccaattctgcaagacattgccacctagctggtgctgcagcagagtttttaacaggctattccaccattctatcaatccaattgcttcagagtcatgcggaacatggtaagaccattggatcataagcgtgggcccattgctgacatctattgctaggaagtgacttatttgatcacacgcaatggtgtgtgatacactgtgatagtgtataaggcattcgtaagtctcttatggtagtttgggaagaggcactgcatgcagggaaggcaatccgtattcaaagtaagtgtctattcctataagaacaaaatgctgctacttccatgatgaaattcataccatgtaatcagcctgcccccaggcagccagccgattactccagggaatgtcaccatatcaggggctcaatattgtcctctgctactggtagactgagcaatcaagtcaggcttggtgagtggaagttcatattgttcaatatattttaacacagttaggcacaccagctgctgcagctgggacaggcagctccaggtgccagcatgagtgctagctcactataaggctttggctggaccagacacaccacaagcagcttccatggctgttacaagggaacacagttgtacctggaagcttgcagactccaggaaccacagggtcccatagcgggagtcacagctctggcctggggagctcccaggtctgggttcccatagagccacagctctttttttcttctctcttcttgtcatccacaacatggtgagcaaggggcatgtttcaaccttgtttgtgttacagcatttttagtcctgtcatttggcaagtcccaagttcttgtgctacctccaggaagaatgaggtatatagacaagtggagagtgagcaaagaggagctatattgagtgacagaataactcagaggatgtcctggagtgggcacctccattctgcagctgggcatcccaatatctgcatctctcagaagagatgaggccctggagtgggtagctgctctctgtagctggttgtcccaatgtctgctcagttctggctgagcctggggcttttataggtctcagaaaggaagaaatgcacactgatcagtccatgagaggccatggatggccccagaaaaggcatcacaagtttacactctggttcacgggactggcagcccagaccccagccttcacacccatcctggcctgaaggaaaggcctcaccaaggacccacccccttctgtgcaggagcctgtctgcctcctgctgccattcatggcacccaggctatttgtgccaaaggatgcctgcaggccagtgccaagctgccctcagcatctcctcagcttccctcccatgcttgtcagtgcccaaagcctgggcaggggccagagacagtatggtactggtgtatcagcactgcctcaagcatgtgcacacccaccaggctgcaacagcacctgagcctacccacaaccttgctccaagatcagagcagatgtcaagagtggggaggagccaggcaatgggagcagaagatacctccaagtctgcaagggcctggggttttttcctgtgcccccaagagtgtagagatgcctgactctgcagccgtggcttgggcatctgtagttgcatcttgaaggacaggtgtcctgtgtgctccatggaatgggaggcccagatctgcagccactacttgggctgctgcaactgttcccaggaagctctaactccaccaactcagaaggggcatgtttcccacttgtatccagctctttaccatgtttcaccgctgtagctgatgtgacggcagtggctgctccagatggggtgccactgccatctttgtagcagtagataattatactacagtgtatttttaccaggtaaagtaaggtttttatggttcactgaggacaatcaatgccttcataaactagaacctgaagactgatcttctgagaacatcaaagaaagactgtcattggcatgcacactacagtaaaacttcaggaccttgaaccttgggttcataatctcacaactgagaaggctccctttacactcttggaactgtacacccattagaagccttaaagaaaagctaaccaggggggtttctccccagaagatggcatccttgactgtgaacaggttttcccaagatcatggatcaagaattctctactatcatgagactcttatctttgattatttgtcccttgcttatgcttctatgaataatagaagtgaaagggttctcttgtgtgcatttatggggtatacttttatttgtgaaggattttgcagccagccttatacatggataaccttataccttaatagacaaaaatgaaggcccaatgtagatgagaaactttaatggtacgtacattgcctcataatcagtcagaaacagaacattgatttactcctcttaacccacatcatgggttaaggagaacatcgctgggaggctttcactcttctaaaagggcatcatttgttaggtcctttttccatagtttggaataaaagcggcaaagattaaaaatgtattcctcatgataggctctgaagcagattctactgtaaaggctatggttacacaataaactttaaattctcttgtgaaagttatgctaaataatagaattgatctggataagttactagctaaacagaagtatctgtacagctgctggcacttatggcctatggggaaaacatcacatattatagatttagttgtaggggattaatgaagagactcttttttttttttttttttttttgagacggagtctcgctctgtcgcccaggctggagtgcagtggcgggatctagcctcactgcaagctccgcctcccgggttcacgccattctcctgcctcagcctcccaagtagctgggactacaggcgcccgccactacgcccggctaattttttgtatttttagtagagacggggtttcaccgttttagccgggatggtctcgatctcctgacctcgtgatccgcccgcctcggcctcccaaagtgctgggattacaggcgtgagccaccgcgcccggccgagactctttagttaagtgagtagactcttcatgtagctcatcctttgatctatttaattttgggtggtttggtttatggggaccccgggtaaggagcacactccaaactcttggtattatcctactgatagtcataataatagtctttctggtgtgctatattctctttaaaagtgttaaatgtttgcatgcagacatctctagcatgtcaaatggtctctctttaactggaatgacaagagctgaaagaaatgtgcagccatgaggacaccgtaacttatgaatgacatgctgagaccagaaatccacaatgatggtaactgagagtggtgctaaggccctaagtttggtcacactctcacctaagtgagaacatgacctaaaaaaaaggggattcttttaaatgaaattatgggaggccattgttttggactgagctcatgcactaggccccaacagaccaaaccagacaaaactggggttgcttgtgctgaatgtaacataatcaaactacgtttgatcatggaaaacatagcaaacagattctagaacagaccaggttttgtttttcttctgtaaacagaatgttccaacatatggacataccctctactcggtccttgttcccatctttgccaaactcactgttctgctctttcccagtaagtttcaagagccatggtaatagtaacatcaataactaaagttttggtcaatatctcaagattgagaaaatgacccaaagagggaaattgttaaatcaagtttagcctaaagctgcctccttacatattaaagttcaacctaaaggtttttctatacatcgtgaactataacaagtgaagttgtaaaccaactgtagcccacatctgtaccaatcactgagttttggccaaatgtagctaacagttccaaccatgttcaaataaggcaaagacccagctgcaaccaatccagttgcttctgtacctcactttccttttgctgtccataaatcttcttccaccacgtggctgcgctacagtctctctaaatgtgctgtaattctgggtgctgcctgattctcccatcattcattgctcatactactttacatttaatttggttgaaatttttctcttaacgacaatcatagaatcagtgtaacaatctgtcttgaaaagtagtaaagtgtgttacttctataggagaaaacaagacatctgtaatgataagccagaatggtcactgcaaacagcaagatgtatatttaactcagcctattctttgtgtaaaatatatatatatataaaatttaaagtagtttgagcaatgaacgatgggagaatcaggcagctcccagaattacagcagatttagagagactgtagcgcagccacgtggtggaagaagatttatggacagcaaaaggaaagtgaggtacagaaacaactggattggttgcagctgggcctttgccttatttgaacattgttggaactgttagctacatttatatatatataatctatttatatattattaaatatatttacatttttatatattatatattattaaatatatttatttttatatatattatatattaaatatatttatatttagatatattatatattaaatatatttatatttagatatattatatattaaatatatttatatttagatatattatatattaaatatatttatatttagatatattatatattaaatatatttatatttatatatattatatattattaaatatatttatatttagatatattatatattattaaatatatttatatttagatatattatacattatatatttacatatatatttatatctttttatatataattttaaatttataaatatttatatataatatatataatatatttataactttaaatttataaatatttatttatatataatatataatatatttataaatgttaaatttataaatattaaatttatttatatttatttatatataatatatatttatttatatattatgtatatttatatatatggaaaacacattttaactagcttcttcactctctcttttatcacttttttacttagatttagaacaatgtgaatagttcatgagctcaaatgttctcccaagttcagttaataacaccagcttgaggttgctgtacacacttaaggaaatgtgctaatatttaataaaactaatattaataattacctcatagaccctccactctttctctttttcataataagcaaatctcctctttttataaggctcacattggagggtttatgccatatttattttaatacaccgactttgtgaagatatcctgagttctagaattttttacatcaacatttttcagattgatttgtcatgaatgttattccctgtccatctttttttcatctgtaactgtttattaggacttgttatgtaccagacattttgctagcaactttataagcagtatcccatgtaatcctcaaaatactctatgaggaatttttgttatttattctcctttacaggcaagggaatctaaatctcagggaagttcattacctgttccagtgttacagaggagaaaggtgatggaactgggatgttagttgcatccaggcaatcctacatcagctctcacttttaatctcttcccaactttgtctctctctatttcttttcagctgttaatgatttcatatgtatgattgattttgcctgactgagccaaactatattagcatgttattagattagaataacttaatctctttacttggagaaaaaaaaaacaaatcaattaaacaactgcactgatgagacagaggaactgttttaggcataatgtagtctagaagttttttgagtgtgatcaacagaccaacagcatccacatcatacacaaatgtattagaaatgcaaattcctgggtaccattccagcatgaatgaatcagaaactaaggaaacagcaatctgtcttttaacacatcttttaagtgaattttaaattctaaaatatattaaccactgccataacaaaggggtcagcaaattaatgaacatgagtcaagcttaggcacctcctatttgtttgctttttaaaatttcaatatgatatacatacatcatttaaaaatttttaagtgtataattctatggtagtaattacatgcaaaatgtataaacatcagaactatctatttctaaaattagctcatcactccaaacaaaaactatactcataaaacagtaacaccttttaactctcccctcacatcctagtaatcactaacatattttctatctctatgacttttcccattctagatatttcatatgtttgggatcatacaatatttgtccttttgagtctggcttatttcacttagaaaatgtttttaaggttcattatgctgtagtgtgtatcaaaacatcattcttttttatggctgaataataatcctttgtatttatgtacaacatttttgttcatctattcattgcttaaagattcatctgttagggtttttctaccttttgactattgtaaaaaatgctgcaaaaaaaaacactggtgtacaagtatctgtttgagtcacgcttgaattattttgggtatatacctagaagtggaattattctatgtttagctttttgattaacctccaaattgatttccacagtaagcgcacaatttgatattcccaccaccaatgtaagtgtctttaactttatccacatcttggctaaccctttttcctccccctattctctctctctatttatgtatttatttatttttattactgtcatcataatagttgtgaagaaggccaggtgtgctggctcatacctgtaataccagtactttggaaggctgaggcaggctgatcacctgaggtcagaagttcgagaccagcctggccaacacaatgaaaccctgtctctactaaaaatctgaaaaacaacaacaacaacaacaacaacaacaacaacaacaaaattagccgggcgttgtggcataagactgtagtcccagctgctcggggggctgaggcaggacaattgcttgttgaaacaggtgtcctttcctcactttgtttttgtttactttgttgaagatcggttggctgtaagtatttggatttatttctgggttctctattctgttccattggtttatgctcctatttttataccagagcttttgcactgcaaaaggaacagtcagcagagtaaatagacaacccgaagaacgggaaaaaatattcacactctgtacatctgagaaaggactaatatccagaatctacaatgaactcaaacaaatcaacaagaaaaaacaaacaatcccatcaaaaagtggactaaggacatgaatagacaattctcaaaagaagatacacaaatggctgacaaacatatgaaaaaatgctcaacatcactaatgatcaaggatgggtacaccagaatctcataaatcaccactaaagaacttactcatgtaaccaaacaccacctgttccccaaaaaactatggaaattaaaaaaataggttctttgtcttctgttattgagttttaaagattctttatatattttggatattaaatctttatgagatatatgatttgcaaatattttttccattctgtaagctatctctcactttcttcataataatgtcctttgatgaaccgatgttttcaactttgataaagttcaacttatctagttttttgttgctgtggtatttttggtgtcatatttaaaaatccattgccaaaccccagttcatatttatccctaagagtatcatggttttggctctcatatttgagtcatcgattcattttgaataaatttttgtatatagtatgagtaaattttttacacatggtgtgagttaatttttgtatatgggatgaagcctaaccttaatttgcctttggaaattcagttgtcctaacatcatttgttgaagatttttctttgcccattgaatagacttggcaggcttgttgaaaataaatatttcatatttatattatggaaatataaatatttccataaatatatggtttatgtctggattcaattctattccatgtatctatatacctatcctatgccaattccatgctgttttaattactgtaggtttttgataagttttgaaatggtagagtttgagtcctccaactttgtctttgttttttaggatttccatgtacaattctaggaatttgagaattggtatttcagtaccaattcagtactgtttcagtaaaatgactgttggaattttactaaatattgtattgaatctttagacagctttggtagttctgctattttagcactattaatttgtcttcaaatccatcaacacagggttgctttcaatttgtttagaacttctttaatttctttcagtgatgctttgctcttttcagtgtacaagtgttcacatttttcattaaatttattcttaggtgttttgttcttttagatactatcataaatggaatttgtttcctaattttgtttttggattatttatttctagcatatagagacatgaatgaatcttgtgtgttgaccttgtaatatgcacttttgctgaattttttattagctctagtagctttctgatggattttcttcagattttttttatatatagaattatgtaatctgaaaggagaaataatttattcctttccagtttggatacctcttatttgtctttcttgctgattgctctgctagaagttgcaatgttcactagtgattaaagcagacatccttgtcttgttcctgattttaaagaaaagtgttcagtctttcaccactgaataggttgttagctgggggtatttttaaaatgtcctttattaggttaaggaaattcccttctatatgctcagtgacttttatcatgaaggtgtgttgaattttgtcaaacgctatttctgtgtcaatgaattgatctttttcttcttcttctttgctctattacatcggtaatttcagtgtgcttctttacattgattggttttcttatgttgaactacttttgcatttataagataaattcttcttggtcatagggcacaatcctgtttaggaatttggtttcctagtatttggtaaagatttttgcatttatatgtgtaaaaaatattctcctgtaattttctttacttgtgatctcttcatctgaacttacactaggggaaatgcttgtctcatagaatgaattaataagtaatatctccatttctgtttttggaaaagtttgccaagcaatttctgccagttcatctctaaatgtatcctagaagttactattaaaaccatctggtattcgcggtagctcatgcctgtaatcccagcactttgggaggccaaggcaggcggatcacgaggtcaggagatcgagaccatcctggctaacacggtgaaaccccgtctctactgaaaatacaaaaaattagccgggcgagatggcgggcgcctgtagtcccagctacttgggaggctgaggcaggagaatggcgtgaacccaggaggcggagcttgcagtgagccgagatcacgccactgcactccagcctgggtgacagagcaagactccgtctcaaaaacaaaaaaacaaaaaacaaaaccatctggtaggtatcataattttcttgattgggtgggttttttactacaacttctatttctttacctgttattggtctgttgacatatatttattatttcttcttgagtgagcttaggtaattagtgtgtttctagaaaattcaacaatttcatctaggttatctagtttatggcctaatttggtcatattattctcacaatcatttttatttctataaggtcagtagtaatagccccagttttatttctgatttcagttatttattatctcttttcttctttatcagtatagatttgtcaattttgtcgattttttcatagaatcagcttttggttttattatttctttctctataattcctgccctgtattgtatgtatttccattttaattatcattatttcctcccttctacttgtgtttaatttgctcttcttttctggttcataaaagttcgaagttatattattgatttgagatcttttgtacatttttaaatgtaggctcttacaactataaattttcatctgagcactgcttttgcttcatctcataagtttagtatgttgtgttattacatatcttcagatatttgtaatttctcttcttcgatccattgcttgaaaaggcactcatggtttaattgccatatattgtacatttttcagtttttctcctgctgttgatttaaagttccattccattgtgttctgagaagatgctgtgtataagtttaatgtttttaaaatatactgaagaattctttgttgcctaacacatgggctatcagagagaacatgtattctgctgttgttgggtggaatgtcctgtgtatgtctattaggtatagttgatttatataaacactatactttaattcccctatttccttgttgcagattttctatcaagaatttgaagtggcctattgatgtctccaactattattgcagaactacacattctttccctaaattttgccaatgtttgctttgtatattttgggggctctgttgtttagtgtgtgcatatttataactgttatatcttcttgataaattgatccttttattagtgtttaatgcccttgttccaattgtaacagtggttaaagtcaattcatgtcatattagtagagccacaccacctctcttttggttaccatttgtatggaatatatttttctgtttttcactttcaatttatttgtggcttgcatctaaattgagtctcttatagaaaatatgtagttgtatgattttaaaaatccattacactgatttttgcctctcaattggaaagtttacttcatttacttttatagaaattattgatgagaattactactgccattttgctttttgttttctataattttttgttcatttcttcccttaatactttttttgtgattagttgatttttatagtgaaatgttttaaaaagctttgtcattttcttatgtgtgcattttaaaaaaattgtctctaactgccataaggattctatttaataaatttataatcatctatgttttaattaatgcgaacataatttcaatagcatgaaacactccatatctatgtagtccccttacccatttcatgttgtttcacaaattacattcatatacattctgtgctgaataacataaatttataattatttttataaatttttttcaacacatatagaaaataaaaatggagttataaactaaaaataaaataatgctaagttttataattgcccatggacttactttttccaggaaacctttatttcttcattcatctttaagttattgtctagtgtcttttcatttcaacctgaaggaatctgtttagcatttttcactggacaggtctgcaagttataaactccttcatcttttgtttctctttaaatgtattaattttttactcatttatcacagaatgttttgctagataaagaattctcagtaagtagttgttattgtttttggtctttctttcaggactaaaacatgttattccactatcttctcacctccatcatttataatgagaaatcagctattaatcttattgaaaatcccttgtaaataataaattgattttccctagctacttgcaaaattgtctgtctttagctttcaataatttgacaactgtatgtctcagtgtggatctctttatcttacttgatgtttattcatgtttcttgaatttgtatatttatgtctttcatcaaatatggaaagttttcagccattatttcttcaaatatttgtcctgccttttctctctgtcatctttttctgggattctccttcatatgttggtccccttgatggcatttcacaagccccttaggtgccatttacttttctttattatttttttttctacttctcagacttgatagatagaatagataatttctatcaccctattgtgaatttcctgattttgccttttggctggtaaaatttgtgttgaatttctctatttaatttttttattccagtttttatactttaaagctccagaatttttggctccttttatagtttttctttattgatatttttattttgttcatttattatatttctgatttttcttatttggttgttcaggttttccttcaattatttgagcatgtttaagataatttttaaaaataatctttttgccggcaattacaacatctagacatttttagggatggtagttgttaatttattttgttctattaaataagtcttatttcctatttctttgtatgccttgtgatttttttgttaaaaaaatggacacttgaatattacaatgtgattctggaaatcaaatgttcctacttctcagggtttgctcttttgtaattattgaaggctgtagtaaactcttggtataatgacatttctctactgtttttcagcaaatatatttgttgcatatattgtgaataaagtttttgttctttggctttttttgttcagctaatgtttgacagagttttcttgaacaccaggaactaaaaaaaacaacaaccaaccaaacaacctctctctgtctttactgtttggctctgtctgagtacctctttaaacacttagccagacttgcattaaggttagggatatgtagactaaataaagaatatgtggtacatatataccatggaatattatgtagccataaaaaggaacaagattatgtcatttgcagggacatggatggagttggaagccattattctcagcaaactaatgcagaaacagaaaaccaaacactgcatggtctcacttctaagtgggagctgaaccgtgagaacacatgaacacatggggggaaacaacacacactgaggcctgttaagggtggtaggggctggcaggagtgaaaacatcaggaagaatagctaacggatgctgggcttaataactagatgatgagttgatctgtgcagcaaactaccatagcacacatttacctatgtaacaaacctgcacatctgcacatgtaccccagaacttaaaataaaggttgaaaaaataaaagtttagggatcagtatcagacaaaacaaagatccaaaacactataaaacttaaggacttcttaggtattttttgaacatgcactgtataattggcatgtatgaggcttttcaaatctctcctaactcatgggtgttttttattaccctaattttccaaggaatatctctgttcttattgtgtttccaggccttggatatttgtttatatatcttaaatgtcttttgcctcaagcttaggtttcttaggagtccaacaatatatttaagcaactcccaccacttttaccgcttggatatgctgtgcaatagacaaaacagatgaaagcaccttacatcattcctccaggtagcccccatagaggttaaaacgggccaaaataatttgcaaatgaagttgtctcttctacctctggaaacagggactattctctcacactgggaacgtgggctgctgtctgcaagactgctcttcaactggggagtggttatagaaagggaaagtaaaactgccacaatgattttttattatttttacattgacattttattgctttagtgttcactgtgttgctataaacctgtctgttttccagtgttctgacaatgttgattctgatggcttctactcatttttcaatatttctatggagggacagaagcttggagttgccaaatgcgacatcttgcttatgtcactccctcctatctgttttagtaaacttttttgtgtgcgtgtgacaatacaacaatttaaatttattgcatatactcgtggctgctgttttgctacaatgagttgagttcaaccaagattatataccctacaaaaaactaaagcacttattatctggccaattgaaaaaaaaaacattttctgacctctgctctagactggtaaagttcagatttcacaaatttcaaatagataacttcctttatagccactttgtttttatagtccgccttcacatttaatgagtctacatttattacttagtacttggtatataccaaaaattcttgatctctttcctgaaattttacatctactttagagttaaaaaaataactagaactcagagcatctcagaaatgttcagtctcagcaagctagtgaatgttttactgtgaacagattcacaggctttactgattccagagccaaaatgctaataagtttaaacatatattttggataaaattgatctgcctccataacaaaggcactggtcttacagttaacctgtaaatcagttgtggatgtaaaggcattattgccaattcaatttggttgagatgagctttagtattcaatcctattgttctgagtgtcaattagagccaagagtgagcctacaatgttatcgatgttatcgattctcctccagctgagaacaaagttctagaatggccagctcatttttctggtctttattaacctaggcagcctacacctgcatttatatttaattatcataatgagcttctttttaaaatagtatcacagagggggatcagagtgtttgttcattaaatctctaatgaaacattgtatgtagcataaatgtattattctggattatattacatcacatcaaagtacagaatttaacagaatgtatcccaaactccataatagtttggccagatacagaaacaatttccttcatccctactgagagcagactgagttgtggaattcccaaatatagctttcattgaaatggatgggacttctaagatcagtagtagcatttatatgatgttattcttcaattgtaagccattaatttgattagttatccatttgcatttttacttgttatactgatttcattgcaaactggagaaaaaataaaggaaaaacaagcaagaagatttaactttacaaatgtttcatttccactaatttctactatttaaaaaaagaaatgtaaattgaagcagcataacttaggcaaaaagcattggattcatatttggagtcctggattctactcacaactctgataataattagctgctgcttcttttttttttttttttttgagacggagtctcactctgttgccaggctggagtacagcggcacaatctctcctcactgcaactctgcctcccaggttcaagtgattctcctgcctcagcctcctgagtagctgggactacaggtgcgtgccaccatgcctggctaattttttttttttttttttttggattttagtagagatggagtttcaccatgttggccaggatggtctcgatctcctgacctcatgatttgcccgcctgggtctcccaaagtgctgggattacaggtgtgagccacagtgccttgcctaataattagcttcttaagcttgggcaagtaatgaccattgtgtttcactttaaaattaatgataaaattaatcattttatcagtgatacaattaatcattttatcagtgataaaattaatgtgtaagaaggtattgtctctgcttcagaaaaatatgtgctgtatgttattgttttcactgggaaagaattggcaaattccatattttatattaagctcctcaaattttatgttcctcattgtgggttcattctgtacttaaccttgtattataagacttgctattgtggatgctgtggatgccaaggcccttgtcccactgtggttttactaaaaatctagttgcaaaaggcagattaggaggaaaaaaagacttagaaattcatttaatgagtatacacggcagccttccaaatgcagaccctaagatacaggggaaattaacaaagtatggacagctgtgtagaaatactattggaagaaaggtatatgacctaataatgctaatagactgggtagggaaacccagcaaggcctgtcagtctagatttttcttgacatttctaagcatgtgtttttttcttcttctggttatggggcagcaacatctttggagtgggggtcttaagatgttcagtcaaacgaggtaagtcagataatttctttatggccagttttcacacagataaagtggaggaaaaatcagagtaatatatttaggttttatggctagctttaaagaaaaggggttctaggggttctgtttactatgacccactgttgtggaagagagattctagtttccatggccagccttatgggagaataaaactgagagacaagaggacaggagaaggtcagagaaaaatgtttgtttctgaggctgctgctgagcctttcatttgggggttttgttttctgatccccagaactatcctacattgtaattgcctatttacttgtctgagttccctagttagaccctgtgctccttgaaggcagtgagtagtttttaaatactattttactcaattgcaattgcttaatatctggcacacagcaggacctctacaaatatctgtgcatgaaagaatataattttcatcactcattctattctgaaatgcacacacacacatacacacactgatgaatcaatcaatggataaacagacaggtagataacagctaatagaaaataatgactgcaggttgtataacacaatcaaagtgtttgttgttgtttattttctttgaaattaactggcatgctcgatctcattgacactagcatcaaaatacctgatattattagccgtgacatatgttaactagtggtttctatgactgcttcccatcactactccccacctcagtgatccttagtgatccatttgctcatcaaattgaaactaatttccccaaagcaaggctattatgaatttgaaaaagttgattatttccgagcagataactttaaatgtcatggagcctatttaaagacagctttatagcacaaaccttctgttcaagccttaatgtacaaccaaatggaccaaatgaggcaaacagaatcaggcttccaaatataatcataattctagattagctctcaaaataagactgcagttcatatattctacaaagtatgttttgacattaaatgtaatatactgaggattatttttctgatttacacttgctttggtttctacctttgggtaggtggctctgactgtgaaaaagtcgctgtgagcctgccaggctacatctccctcccagaggtgaaatcatgccctattctccacattgcctttgccttcagattcttatttacatactaatgtttcacaatgtttttttttctcttccttctaaacctaagcagagatatttcctctacctagtgttattcattgtgaggagaggaattttttcttgcaggtgggagagtatagataagggtaataaaattcccatagttttttgttttgtttttgtttttgtttttctgggcatgaactagtagtatttattttcttttaaatcacaaagtatgattgttgtagcacttcttctcagttctattttcttttttaaaaaacaactgtaaattcaattgtacaggcagtttcaagtaatcaaaacgtaatgtattaatcttgacatctgtggtttgtggattcaaatccctacattctctagcttgtaatgtttatgaggtagtggatgtgaagagttcataagtcaaattcacatttaatttgtactggtttcatcattcatcacaaaatatgctactgaacaacagtgagtatgctgttgatatgtaaatgcacaaatatacatgcacacaacatataacaaagcagtttttatgatgtacctcttgcattacaatactcttatgtagctatacaactcctacaagacataaagtaaacacaaaagctattttcttcacttgcatgtatgtagatgtatcctagagaaatgctattgttcctcagaaatggtatttgtaaatgaattttttttaattagacaaacccaaagtactatactatggagtaagtttgtcttattttgtttttaatcagtgaatatagatgactagttcattcacttagtctttcagaagagttttaatatcaaaattatcatatggtctgactttttttaaagcccagttcttacaaaacaataaaatcagacctggtgaggttctgacaactacgagagaaacttagtaccaaatacatatgctatttctccatttgcacaagacagctaatttgtagaaaacagaagactaaaagttggtaaatcaaatgtgttttataattacatctgtgagagaagaatcctcttatgacttctggaaatatcaaaatctgaaatgactaaataactgacatgccaaggaatttgtattctcttgttcttttacacattaggggagaaaatagtaaaaactagcataattgtgtggcaaaatatccatgaaataatattttgaaagttaaaatatggatttaaattaagacaaatggatgtgttttttagatgtgtatgcctaaaagatggatactgtggatatctgatggctttcttgattaagccacaaccggtggacctcacaaatgtcaaatatgttattccaaaatgtcagttgtttagactcatttctcagcttgttattgatgagtttcctttcacatttggaggaatcctgttggggaaactgaagaacagatgttaagtgtgaagtgtctccctccttagttcatattcatatcacattgtttgagctgccacatgtaaacaatatagacactaagccaactggtcctctgcctactgctgatgtggcagaaaatatctaggaggtagccagaggggcatatgtatacctgttaagtggcctggttctccaatagtcgtgcaagtattgctaaatttgtttcgctcctgggaattcaagcttctatttcagattcctaatccacagcattaattatcttttttgaatacccgaagcaatttatgttgcttaacatataataaagttaagtccattattattcctgtcttataattgaggagactagagtctagattatttaagcaaccaaaatcacacagtcagtcaatgacagagcccatgactaaaattctgtctgtccccagatttgtgctcttcagataatgacatttctgcacagttattaatctgagtaaatagagtccatagtgaattattagctgatttcaggagattccatgcaaataaaagtctgtcatatcatgctctgccagtctacattaatacaaatcacaacaacaaggcagtttatttaaaaatattaaaagtaatagaagattgaatggaaggatgaatggatggattgattaagagatagataataaataaattgatgagagagagaaacacacagagagaaagataaaattaaccacactaataaaagtatgatttggtatataacagaaaaagttctttagtttgtttgtttgtgtgtgtaggtattctgtcataaaaacacaattatctaaaacataaagtctcaatcttttgcttaagaaatatttttaatttaggctggttacaactgtgaattaaattttatttttattttttattttattttattttgatttttttttttttttaagatggagcatcgctctattgcccaggctggagtgtggtggcgcgatcttggctcactgaaacctctgcctcctgggttcaagcgactctcctatctcagcctcccaagtagtaatttttgtatttttagtagagatggggtttcacaatgttgcccaggctggtcttgaactcctaacctcaggtgatccgcctgcctcagcctcccaaagtgcttggattataggtgtgaggcaccatgccctgcccaattgtgaattaaatttatatctagaaaaggtgagaaatattattaacgaagacatttctttctatgatacttaagttatacatgtgtagaaggtgcaggcttattgtataggtatatgtgtaccatggtggtttgctgcccatcaacctgtcatctacattaggtatttctcttaatgctatccctacccttgccccccaccccccgacaggccccagtgtgtgatgtttccctccatgtgcccatatgttgtcattgttcaactcccacttctgagtgagaacatgtggtgtttggttttctgttcctgtgttagtttgctgagaatgatggtttccagcttcatccatgtccctgcaaataacgaactcattcttttatatggctgcatagcattccatggtgtatatgtgccacattttctttacccagtctatcattgatggacatttgggttggtcccaagtctttgctgttgtgaatagtgctgcaataaacatatgtgtgcatatgtctttatagtagatgatttataatcctttgggtatatacccagtaattggattactggggcaaatggtatttctagttctagatccttgaggaatcaccacactgtcttccacaatggctgaactaatttacactcccaccaacagtgtaaaagtgttcctatttctccacatcctctccagcatctgttgtttcctgactttttaatgatcaccattctaactggcccgagatggtatctcattgtggttttgatttgcatttctgtaatgaccatttctgtaatgatgagcttttttcatatgtttttggccacataaatgccttcttttgaaaagtgtctattcatttccttcgcccactttttgatggggttgtttttctcttgtgaatttgtttaaattctttgtaaactctggatattagtcctttgtcagatggatagatcgcaaaatttttctcccattctgtaggttgcctgttcactctgatggtagtttcttttgctgtgcagaagccttttagtttaattagatcccatttgtcatgggaagacatttctaaccagcaacaggtccagtatcagggcctttatgtctttgtccacaaagtgagtatgttctgcacagggcagcagtgtttaaggatatattctcttcatggagtaacacccaactcaaactttaatggtaacactttaaatctttccaagctctaaaagcaatttcttctgcttaattgctttttggggactgtaatacatgtgggtattcttactctaaatataattctctgcatttattttcaacatttcttttatggccacttaagtgacttttctctggttatttatgcaatataggtgacaatcctatttggttttctatttgaacattctgtaaaagctgaataacaactccaaaatacaacacaaacatgcagatacatatacaaacacttactgtattttattcaattaacaagtgtgttcactttaattcacacacaactatacctataggcatgcccacacatacaaacacacatacactgtttctcattcctatttcctttgtctgtacttggtttagttatggcacttttgttttgcctctaacatttttattttaaaaagaaaattaaaataggttattgggatcaaagatataagctttttgttactttgaatgatttttgtaattcagaatatgcacttgttatttcagttcttatttttataattattggaagagtttgtctaattaccctataaatccctagagaaaggtagccaccatatactttatttcttggttatatgtataaaaatcagtaggcaatgtaaaaatgtttttgtgtgaatttatgtgagttataattctaattctatgtcaatattcacctcagattaccacatgaaagcttagtcaccaagtatgcctcatactgaaatacccactgattaaatcagttgacgaccagctcctatcttacattcaaatcaccaggatcaatagaatattttcttattatccagattctcaatccattgcttctactcacaaacttctccccatgataaacatacacacatacatacacatctcccagataaattcttatggtcatgacaaggtaatcccactgcttccatttattaaataattgattgaaaatatttaggtgagaaaaatggttgtgtaagagtaatattgttagcaattgctaaaactgaatgtctatgtaccttcaaaattcatatggtgaaaccctagttcccagtgtgatagtattcagtggtgggcccttggggggtaattagttggtgaatgagattaatactcttataggaagagacaccaaagagataatctctttctctttctcagtctctgccatgtcagtatataatgagaaaatggccacgtgcaaacaaagaaataggccctcatcagtcactggatgtgcaagcacctttatcttaaattttccagcctctggaactgtgagaacaagcgttttctgattaagtcacccagtctacggtaatttgttttaacagcctaaagtaactaaaactgcaattatctcatgaatttggaaatggtctgtgtacacattattagtaattaattttggaaaatttactttttttttggtaaatcttagttctcactaaagaatagggatgataacaataccctatccccagcatgtccatgaaaattaaatggtagaatgaatctaaaaagcccgatgtataatgggtataaagtattcaatacatgctgatatttacttcttttcccctttacgagtacatgcaatacggtctgatgaggtctttttaaaactgttcacaataattgacattttacaagtcatatcatgtgatactttttgccaaacctggtctctggcttgatcagttttattttacatttgaaatttgtacttagacttgtgggactactttcttccatgaaagatctaataccctacaaccaaacacttcattatttggaattaaaaagcgaaattctttgattatatctaagctaatttaagtattttaagtatataatgtttaactgttaagtagtttacttcaattattaaaatgactgagtcagagtaaccgattatacttcctaggcacactaggccagatgtcaagaatcaaggacttcattttcagagctggcactcattagctctgggtttggagaattcacttattctcttcattctttctgaatagtttagcattgttttctagatgtgattgagtttaaatgcactatttggaggcttataggttccattcttttagggaaaataattttgaaaaagaaagaataaaaaactctaggtcaaaagggatctatggctgtctcacagcaagagtgaaacactgagatgcctacatggtatataaatattaaaataaagaaggcaagctgactatgaaaaacaacagctgaattatggcaacaaatgaaaaatgtcagtagtatctctactggggacactatggaatggtggggactgaggataattagagaagacaacctgcctacacatggcagcatctactaagacttatgactctgtttatgaagaatatgagtaaatgtcctgatatttaaacacataccaaaaattaagatgttcatgtattttgctaatttgattattttaaagtaataatattttttattcaaacaaatatattgtcagtttaaaggccactgtttcttacgtaataaaatttgctttttgatttgatgcttgaattttttctatgacatcacaagaaagttattggttatacatgaacaaatgcatgaatggaattattattactttcattgacaaatgcttttatatatgtaaaattttcatcttagaaagttattttatgtgtttttagagaactatcctctcttccatgatgcatctttgttagttctatttctttaagtaacattgaagttatttatttttctgtttttgtatatcacattcttattccactaaaatacctatattttcttcagttatgtatgattggatttttttaaccatccagatacatgtcttgtgacataatagaatcttttttattcttagaatgaaagagctaaaccatagtcagaaaacttatgaatttactatatcacagctactatggtgtggtatgtaaattatgtttatgaaaatttatgattattcagattaagtcctgcatatgtaatgttaagatttttttactttatttttctgagaacttgatttactaaaaggtaaataaatcacactaggatataaatatatcattattattttaaaaggtatgccccagtcctcttcttactgttggataagctcgttctgaaaccacagttccagactcttctcctgagtaaataaacatattttaaagcagtggtaaatatctgttttgtctgcaactccatctccaacaagtaatttgttcaacaattgtcagtatgaagtggatgtcctttacatcagctccctagattttttcaagtccattggtgcttcacaacattttttcagaggttatattctagtcactttctttattgtccattcaaaacacttgctgagacctagggtgtcagattctattttgcctgttatttgacattcccttctcttcccaggccatttagctacatatttcctattggactatctgctttggcatttagtaaataaataccgtaagtcactgagggtatgggaagaaatattgagtcatagataccattttctcttagggaattttcctctgaaggcttgcaagtgtggtatagttcagtgtagtgctaccagcttctgttctaaggacacagctaattgggttcctaatccaagataatttaaacagattatttaacctttttatgttagtgtttctattttgtatagtggttataataaaaccatttactacttaagattaagatcctcatagatctgaagaaatattgtactagaatgcttagtgaaaaatgtctgacacataataaatattccatacattttggcctttgctctcattgttatttttaccatcagctctctcaaccttgaaacctggctcagcccctgtggaactgtagtatatcacccctgtcccaaaacgaagacctagaatatttacccttacatggttcctatatccgaggtcccagaaaggtagaagggggaaatgtcacaataatattcaaaatatctgaaagcaaactgttattgttttagtgtgagaatagagcttcatagaatttgacattgtatttccctaaaatattaaacttgtatattctcaacagttatattataaatatttattcaggtatactcaaaatttatccatattaatgataattatttaaatgctctttagctgttcatcaccatattaatactaggaataatgacagctaattttaattgagtacttccaaactgtggcccagttacagtaaaataaacactattagatacactccatcaattattacagcaagtctatgaaacatactgtattactaagccagtattagaaatgaaaaactcatgggaaggatatatataaaacttgctcaaagttacccagctaataaatggctaggacacaattaaacacctatgtagttttctttcctgagctgaaatcctaaatccttggctgtatggcccctcattcaaaagccctaaattggctaaaatttatataacagaaaattcacagaatcatttccttctacttttccactaccagggctgttaacagtcccaagtaaaagggcaaaattttttctacttgagataagaaaaatacagagtgtgacaggtgttccaccaatataaaaacactttaccagaaaaactgagaagggggctgttaaccttcggggaaatgtgggtcttcagtggattcttgctagaaacataaaaacgtagagagaagattttcatttaaaagcctcctcccttcagcaaagtatattctgattccattattgtgttaggctcctatatagttataagtaaccccatgtggttttagaattcttaaatattcacacacatagtcatctgaagaatgaataaatccatgaatgactaaaccaagtttattcctatatcattttcaatatccttaaattatgcttacatccttaaatcggttgcctcattctcaaagcacatagtctgtaactcgtaaacacctgtcggccgggcacggtggctcacgcctgtaatcccagcactttgggaggccaaggcgggcatatcacctgagttcgggagtttgcgaacagcctgaccaccatggagaaaccccgtctctactaaaaatacaaaaaatgagccgggcgcggtggtgcatgcctgtaatcccagctacttgggaggctgaggtaggagaatcacttgaactcaggaggtggaggctgcggtgagccaagatcatgccagcctgggcaacaatagcaaaactgtgtatcacaaaacaacaacaacaacaacaacaacaacaacaaccaaaaaaatatatatatataaaattcatttagtacggaagagtgtgaggaaacagaaagttaaaaaaaaaaattgaaagaccagcaataatctcactttttcaagaatttgttagctctttctgagctccacttaacagttactttcccattcttccctgcacaccgtcaacacataaggactcaaattaagatgatgtatatgtttacactccaaaatttttaaagaaaaaggagagagagagaaaaaagtaaaagaaaagaaacccaaaagggaaaatatagctaaggtgaactggtgagtttctactcagaatccttattattgagcatgatgtattttgttttcttaatttatgtataatgaaaatggaagagaagaattataaatcatagttcatttttatgatcagtacataaataaaatttgagtctttcttggcattcattactttaccttaaaaacacaagagtatttactttttgtgtggcaaagaaggcctaatggggaaccttgaccttcacctcaacttgacagtaaaaaagagctgcttccttccccttttgcttgccatgtgtctgaaaaagactagtagcaagaatatataaagaactttcaaaacttaggagtgaacaaagtcaaattagaaagtgggcaaaagacatgaatatacatttcactgaaaagaatatatgtttggaaaatcagagcatgaaaagatgtcaacatcattagccattagggaatgaaaaattaaaaccccaatgggatttcaatatatacccaatggaatagttacaataaaaaataatgataatactgagtgctagcaaggctgcaaagaaactacataactgctgcatggttgatgggaatgtaaaataacaaagccattctctataacaatttgatactttctttaaaaagcaaacaaagagtttaacaggcaatgacattatgatgcagtaatttcactcctgggcatttacagcagggtaatttttaaaaaccacgttaattcaaaaactttatacaaatattcagaacagctttatttttaataaccccaaactggaaacaacccagacatttttgaaggagtgaataagtttaaacaaaatgtattacattcatgcaatgaagcactacttagcaacaaaaagaaacaagttattgatatagacaacaacctccataaatcttcagagaattatgctgagtaaataaatctaaccacaaaagattatatgatatagaatttcccttgtagaacattactgaagtgataaaattatgagaatggaggaaagattagtggttatcaagggttaaagatgaggtgaaagaggaaaatagatgtggctaggaaagaacaacatgagggattccatggtaatggaaatattctgtatgttgactatatcaatctccacatattgcttatgatattgtactatacttttgccagatgttaccactgggagaactgagataaggttacaagagatctctctatattatttcttataactgtaagtaaatctacaattatatcaaaatttaaaagttattttaaaaagagagttcttaaattaataattcattctcccaaccttagaaattagaaaaggaagactaaactgagcacaaagcaagaaaaacgaagaaataatacagattagagcagaaatcaatgaaatagaaaataaaacaaaaaacaataaagaaatttaaagatccaaagtttgaatctttgcaaagataaacaaaattgagaaatatttagatgatgaataataaaaaatgccgggcacagtggcttacgcctgtaatcccaacactttgggaggctgaggtgggtggatcacttgaggccaggagtttgtgactagcctggccaacatgcggaaaccccatctctactaaaaatacaaaaattagccaggcatggtggcgagtgcttgtaatcccagctacttgggaggctgaggcagaattacttgaacccaggaggtggaggttacagtgaacccagatcctgccattgcactccagcctggatgacagcagcgaaactctgtctcaaaaaagaaaaaaaaagaaagaaaaaagagataatgtgctgactaccaaaatcaggaacaaaggttactactaccaatcctcccccatcccatccaaatatattaattataagggaaatactatgaaacacttttgatcacaaattatacaacttatatttaaggtagaaagtcttaaaaacatataaattaccacagctgaaacaaaaatgaatagaaaatctgaataaatatatcgaattagcaattaaaagtctttcataaggaaatatacaggacttcactggtaagttatttcacatattcaatgaagaaatgatacacatactcagaaaatagaaaaagagagaaacttcccaattcatgttataaggcctatattcaaaggcaaaaataaaaaaagaaagaaaaagaaatttaaaaaataaaaattaaaattaaattacagatcaatatacctcacagatatagacacaaaaatctccaataaaatattatcaaactaaattcaaccatatataaaaatgattgtactccatgactaagtgaaattaatcccagaaatgcaagattgtttttgtattttaaatataaaatgtaatgtaatatactgtgttataaaataaagaactaaaatgaaatgattatctcaatgatgcaggaaaaggatttgacagaatctaacatgaattaataaaaaaaaatagaatggaaattcttcaacctgatagaggacatcaacaacaacaacaaccaaaaacactacattttacagcaatatctaatgatgaaagattggatatttgcccctcaaaattggcgacgtgccaaagatgtctataatgtttactcactaattctatccaatattgcactggaagttatagccaatacaatgaagaatacattgataaagccctcaggaaatggaagtggctgggctcaatagctcaggcctgtaatcccagtgccttcggaggccaagtcaggaggcttacttgaggctaggagttcagatccagcctgggcaacaaagacaaatcctcttctctatgaatttattcatttttttaaattagccaagcatggtggcattcacctctccgtcttaggtactcaggacgttgaggcaagaggattgtttgagcccaggagttcgaggttgcagtgagctatcattgcaagttactgcactccagcctggtagatagagaaagacactttatctcttaaaaaaattaagaaaataattatattcacaatactatacaaataaacccttggaaataaatttagcaaaatgtgtgtaaggactgtatgctgaaaactaataatctaagcaaatggaaaatcattccatgctcatggattgggagacctactattgcttttctagtaattctcccatcatagatctatagatttaatactattgttaccatacattagccatattatatgaacataaatatttcatttgtgagcctcatatctaattatttgttatttacatataaaataattattttaatatgagctctttgaaaagcactttaaaaatggttccctgagaccttggctttcaagttctacttaaactattcagtatgaactagaaaatttagtaaacaaagtgtcatcttctgcctcattatctttttatttggaaaactatgttagactccaaggtattctctctttacttcaatgtaacagaagtaaccagtttaattgttcagaacctgacatttatttaatcatgtcttcttagtgttcaggtttattgtcttcaatgactggatgccagtctgcttcctttttgactttcctaggctcggattcatcagattctctacttgtgccatttggaatggaaagaccctcccacagggtagaggttattcattctctctctctctctctctctctccaccacaatttttgccaagagcaagtcaggtttttggtcaagctaaatttttactgcatgctttccttcaactaagtgtgaaagaaatctattaaataatatttaatttggtctcaaatgtgaaccatactctccaacctagtttttctaccaaataaccatgaactgaaatttacttcatagttttgaccttcataaattgtttgtttccccatttatcttcaattcttatatgttttgaaattattgatatcaactctggagaaaagagtaagtcttacaaccggcataacaacaggtacaattaaagaagtatgttccttaacatgagaagaatgttaacccatttcaatcaaaagtatttcatttttcccatgagtaacactatgctgtgcattgtggagtttacagaggaggtgagatatggtcctgacttcgtggtatacaatttcatttgatagggcaaggcatatgtggtataataaagatatagatgttactgacgtacatgagagccttgtgggctgagttcccttatagaagtggagtctgtgcaatcttgaaaatgggtagcatctggataagaaaagagtcaatcaagtaagagaaatgccccaaaattgcttctatgatagtagaacagcttctttcagaaaaagctacatagacatttaaatttaaaattatagcatcttacaaacaaatatataaataccatttacttttatgtctaatacatttagggaaagtatctaagtcaatgttaaaaattctatttcaaatcctcgcatgcatctcctttcactaattaaataatagtgaactgtgttttgaaatcatcagacacttcaaaattagttttcttttcaaataatgcaacgtagtaaaatggtggacttgcaaagttcttattttactgtgattcttctatgaaaataatgtaggactatttaaaatttttccttaaactttccacaagtgtaaagtaggtaaaacaccacaagcaatatttgctgaattattacaatatattatatgtcttttacttaatatgagttatacactgagaactttttttttcacaataattctccgagatgaagataaagtggatgaaaagttgaagtaaagatgtattcaccctacaagacttaatagtgagtctatgcttaactcaagattgcactggccaagggattaaagaggcagaggagaaactgcttccagcgttgtttcccaataaatcaataaaacttgtcaggtgttttcatccaaggagagagtaacactaacctctatcttcatgtatacattttttccaggcttttggagcttgtcaatgattcctaaacttggctttatattagattcacctggagacccattacaatcccaatgtcaccaggcatggtggctcaagcctgtaattcaagctacacgagaggctgaggcagaagcatccctcaagcccaggagtttgcggctgcagtgagctatgatcatgccactgtacactagcccaggtgacaaagtgagaccctgtccccttctccccaaaaatcctgatgtccaggttatcaaattagaatttttgaaggtaggattgaggcagtgctactaaaagcaatgacaaaaagaagcaagcaagcaaaccacttgatgataatatggaacaaaggttgagaaccaccagatggaaaaagaaaacaaattcattaatactgatcgtctattacctttaaataacctagatctcaagagatcccaatatacaaaagctttggctaggacctgagaatctattataattagcattttcattaatcttaatatctcactcatatcatgcacaaaattcaatgtaagatggatcacagacccaaatataaatgctaaagcttctagaagaatactttgaggaacatcataatgatcttgagtgagataaataatgattttttttcgagagcacaaaatgtattaaacataaaaataaaaattgttaatgtttttactatattaaacttatattcatttattcaaaaaaacctcattacatatataaggaactcctaacaacagaaaaaaataacttaaaaagggaggcaaaatgattgaataaattttcttcaaagacatacaaatagccaaaaggtatatgaaaagatgttcaacgtcactaatgatcaaagagatacaaataaaaaccaaaatatgatatcacttaccacttattaggaggggtaatttggaatttccattccaaaagaatggaaatcaggatgtggtagagttacctgcatacccatgttctttgcagcattactcacaaaacaacaaaatctgaaaacttaaatgtccatcagcacataaatgaataaagaaaatgtggcgtataaatacaatggaatattttcagctttaagaagcaaggacattctgccatctgcaagaacatgaatgaacctggaggatatcatgctaagcgtgataagccagtcacagaaggataaattctgcatgatttcacacatatgagctttctaaaatagtcaaactcatagaaatagagaatagaatggttaggggaaggaggaagaagggttgctgttcaacaggtataaagtttcagttgtgtaagttgcgtaagttctaaagattttctgtgcaacatcacgcctatacttaacggtgctatagtgtacatttaaaaccttactaagaggatagatcacaagttatgtttttacctcaatgaaaaatgaatagaaatgtcacagtgagataacacatttgaaatacacagacctgacaaaatatttctatggaaagtaaataaatcctacaaattgttatgcagaagatacatcactcaattagaagtgggcaaaagacttgaacggtcagttcataaaagaagacagccaaatggggaatcaggaaaagaaaatgtgctgaacatagttggtcatcagaaaaaatgaaaataaaaacctcaatgagatgtcattacatatccaagagaactggtaaaattaaaatggctaaatacctggagaccgatatgggaggatagcttgagcccaggagttcaaggctgcagtgagctatgattgtgccactccactccagcctgtgtgatggagcaagaccccatctcttaagaaaaaaaattggggactgaatatagcaagtgttgaaaaggctatgaaacaaagaaaatctcatacattcgtggtgggagagtaaatttacagctatattttaaagaagtttggcaatttcttataaagttaaactgcacaaatacccaatgacatcgtgattcaatttataggtatataccaaaaataaatgagggtgtgtattcacacaatagagacagatataaaattattcatggcaggttttttttgtaggcaaaaactggatggaacatctataaagtggagaagagataaacaaattataatattgacttacagagtaataatacatagcaatagaaaataaaatattgacacataaaacagcatagataaatctccaaaacatcatgttgagtaaaataggtcagatacaaaagtgtaaaatctgtatgattccagacaaatttgaccagtggttgttactgactggaataaagcaccagaacattttctgtggtagtgaaactgttccttaccttaacatggctggtgtgaatatgagtgcagaaatacataaagttaaggtatacatcttaaatttattcattttatgaaatataaatttagtcttggtaatgcacttccaaaattttttattaaggctataattaattttatatttttatttataaaaatgagtgatatatcacattatatttgaatatttttctaatagaagaccttatggcttaaaattaagtattctctttaataattatcataaatttataatttaataagtgatttataactgcacaataacataacaacaattttatgcttaggtaaaattgtctttattttaaatttaagtagtacagcaactttacatggcttacctaaaccacacagttattaagtgatataattgggactctaatccggggctgtttctaagtaatatgttcatttctctttgaatttataacttgaatacatctttttaaaaaattattaatttttaaaatttaattaattagttaagatactctcaatttattgaagattatgtggttcttgtaacactagatgggttaaagtcatacttttgacttctattatttatgtgattttatgtgatcttggccagtcagcctttttttggtaaaaggggaatgataatatctctcaagagtattgcaagattcaaatgaaattaaatgtgttgaaagcttctgtaagaaatgtacacagtacacagaagaatctccatttttataatttctcaattttccctttacattttcattcttactgtcatctgtctctcactgatgctgctgcttctcatgtagccccccaagtgcagactagttctcaccctcagcgctctaaccactgcctctagaagtagaataagtgtcctcttgcagaatacttctacttccttctcctcaaacccctccagcttggaatctcataccatttgattatattgatcactctcccaatgtttagtcactttccctcattctttgaagtctttacaacctgacttactgccattattttgatatctcatttaaattacttatcttctttgacatttgacctcgtcatttccaacgtacttgctatcttcagtatctagctattcaatctcatgatctcagctcaaaccatgttattactcctaattgcaaatttttacaatctaacttttaagtttcctgccttctgaacattaacttctatctttctagttcattccatttactacaacttcaaaaatactgtgactcatcctggatctacaatctcatacaatatacaatacagtccttatacaattctcaatccaataatctccacacatcctttacttctcagcaaacctaccttcaaaacatttaaataatttttactactgctgttatccacccaggcctagccaacatcatgtctcatctgaatttttatcccccttcctgcttctgcattagccctcaccttcagtctattctcaatacccaagcaagaatataacataatatcatagagatcatgccactctgctcactcacttttaaggacttctaattccactctcagtcattattgtacagattatacagctctactcatgctccccaccaggcacacctctttgatcacagccctgttgctcttccccttgtgcctctgttccatctttactgcacccaacacttcctggtgctctttgggcagcctgggaattgtctctgtgttagtccattcgagcagctataacaaaataccatagactaagtagcttataaatgacagaaatttatttttcacaattctggaagctaagtcccagatcaaagtgctgacatattccgtatatgatgaggccctatttcctagttcatagacccatcttattcttcatatggtggagtcatcatatggtggaagggacaaaccaatcccctcaggcatcctttataaaggcaccaatctccttcatgaaggctctgtattcatgacataatcaccttccaaagaccttaacttttaatagtatcatactggaattagacttcaacgtatgaatttgggggggttgtcaacattcagaccatagcactgtcacgttagatgctttgtacatggtttctctgactgaaaacacctgtcttcaaattcccccctggattgtttccttacctcctggattagttccttctcatgccgctaataaaaacatatcctagactgggtaatttataaaggaaagaagtttaattgagtcacagttctgcacagctggtgagacctcaggaaacttacaatcatggtggaaggggaagcaatacatccttcttcacatggtggcagcaaggagaagtgccaagcaaaatgggggaaaaaaccctgataaaaccctcagagaacatgagaactcactcatatcacaagaacagcagcatgggggtaactgcccccatgattcaattgtctcccaccaggtccctcccatgacacattaagggattacgggaactacaattcaagctttagatttagtgggggacccagtcaaaccacatcaccttcttcaagtctttcactcaaatgctactgtctctgtcatgccttccttatttccctacttaaaattgtatctccttctcgtgttctttatttgctttgtctgctttactttcctccatagcacttagcaacacttaacatattatatagtttaattttttatgttattatatatctccttccaagagaatgtaagctccaaaaaggcatatatttttttctttcctttttttcacaggaaaaaaggaaaggccctgtgttatatccacagggcctacaacagaatgtggtacaaggtaggagcttaatgtgaatgaatgaatgttagtcttattaccttttaagtttacctaattttctaattttctacattttctaccttcctccgtcctttccaccttcctacctcctttgggatgtgcatacagaaagcagcaacattaaggtaagaaagtttaacctttggattaatattaaaaccttgagacagttttgcttttctgttgcctttagcaaaaccacattcctgctgctgtcagttatgacgcactgagaaatcttcagagacctaaactttttccacaagatgactggagaaaaataaatcaccaaatatcataaagatacttgcatgttttgtaagtgattaatgactgctttctcataacagtaaaaactattttgttttgtatgagaggatttttcactctaacttttaaaaaaatcattacatacaaatatatcacatcaaacccaaaagccattgctagcacactggttcctgtcttaatattaagtatgagacaaaaggcctttatcttccagaaagttgtttataacatgccaaatatgtgaacacccaatagtcaaaggacattatctctgtgatgcaattttgaaagttggtaaaataattttttatcaatttcatcctacaagcacataatttaaaccattcttttaaagtggattttagaagattggaagttttagaagtcagtccctccacaaaaactgccattaaactgcaaaaaataagaattaacctttttggaactctggatcctaatcagataaataacaaccattagtagagtgcttgatgctattggtctttagtaagaaagtggctgcatgcacacgccagataacatcactcattcttattcacaagagtcaaaaagtgaaaacaaacctgtatgtgtggataaacaaaatgtggcatgtacatacaagggaatattatttagccataaaaagggaatgatgttctgatacatgtttacaacatggataaaccttgaaaacattatgctaaataaaataagccagacacaaaaggacaaacagtatatgattctacttatatgaaagatcatgaatagtcaaattcatgtagagggaatgcagattgcatgtttccagagcatggaggctggggcaaggggaatgaagaattagtgcttaatggtacagaacttctgtttgatgtgatacaaaagttatgaaaacagtgttaattatacaacattgtgaatgtattcaatatcactgagttttagaattgaaaatgattaaatggtaccttttatgttatgtatatttaccactgggtaataaaattgtattaatgtaggtgaggcaattttaacagttgtaccactctggaggaggatatgataatgaaggaggccatgcatgtggaggcaggatatattacatatataatatatatttataatatatataattatatatatattatatatacacattatgtcagggtgtgtgtatatatatattttatatatataaaaaaacatacaccctgcctccacatacatgtaagacatatatagtaatatatggtatattatcatatataatatatataactatatatatatatatatggtaaatctctatcttcctcttaatttttctgtgaaactgaaactgccctaaaaaattcaagtcctacaaaaatgaaagtgaattaaagtactttttctggaacaaataaacttagcataaatagttaaaatattaagagttgtaattaagggaaatttccgctcaatgtgacttcaacagtttaaaaaacgtattactacaataagaccacggagagaggaattgggagacccagaattgattgggtcagaaattgaaaatgatattatcagtgacccaggtttgaatgtctctcttcacagcattgacttcactaatggatgtgacctggttggcagcagtagcttggacaacatgcttgtttgcagtgggtggtagagagaggcaggttttgctttcccagaaaccctgaaaaaggtcatcaaacctaaatttccttagccttcttccatgagcaaatcactagcagatgattgctagcaaggtgttactattacaatgaacccctaagtatcatagaaagagttagtttggggaaatatcctctccaccacaatcttagtcatttaagtcaatttaacaatatattgaaatatttttcttagaagtttaaagttccattaaagagtaacgattacagaaattataggtagcctttagttccacaagtgacatctcaagaggaagatgattcatcaatttcaaactttccttgcaagtaatactggatgaaaattaacttggcaaacataattaataatcatgggttattaattacttccgcaaggtgggtgtgctgattttaaaaggcttgaataaaacataaatttccttaatttgatactgtaaatggagtaatttggtgatgtaaatggaaatatttaagtgatttttgcgtcagatcttacaacttaaaatatttttctaaaattagtttttgtaccatctctccagcatgttccagcctatatcagtcagtccaggcttctataacaaaatattatggactgaatggcttacacaacagacatttcttacaattgtagaagctggaaagtgcaagattaaggtactagcaaatttgtttcctggtaagggtcttcttcccggtttgctgtatcctcaaacagcagatagagaaagagagagagagagcactctatagactctcttcctgttcttataaggacactaattccattgaagagggccctacactcatgactttgtctaaacctaattaattctcaaaggcctcacttcccaatactgtcacattgtggggcagggctttaacatatgaaatttgaaggaaaaggaatattcagtctagaacaaagccccataaatttcaaaaagctgtgggacaggagggaatggggatggtattcaatagtaccacatccaagcaagtcttgtgtggttaaaacaaatcaatacagtaacatgaaattttacacagaaacctatctaattataaattgtatgcttaccataatcaacactgttatacattgttttaaaaatacttaataatgttttttgtttaaccaaataatagaggcattaactagtttcccagtgctgccaaaagaaattgctacaaaatttgtggcttaaaatagtaaaacaaacaaacaaacaaacaaaaaattctctctcaattataggaggccagaagaccaaaatcaaggtggaggcagaggcatacttcctctgatgcctctagggaagaatcctttcttgcctcttctagcttctggtggctcctggcactccttggcttgtgacagcataactctaacctttgtctctatcttcacatgaccttgcttgtgtttctgtgtcccaactacccatgactcactctaaattcagatgatctcaccctgagttctttaactttattatatctgtaaagctcctatttcaaaataaggtgacatttacaggtactggaatgggagagggtctaggacacagacactcccttatgaggatactacatgacccattacaaggcacaaagtaatcaccataggcaaaccgctagtgagagctcactccagttcggaatatattcatgtttctatgtaagagaaaaattcatccttgcttcagttcatcttggcatcagtacaagggtgggattcagagacatataagtgtggaataccagatcccaccacacttaaaaagctggcatactaagttcataaacaatgtagagtgtgaagttgagttgaaaatgcttatgccatacagtttatgtatcttataatagccttaatcacacttccagtaatgttctccaccactggatgctaaaaaaataaagttagttaaagaattagatagtataaaaaatatatatacctctttgagtggaaaaatgctgtcagcacattttgttattttattccattgtataaagtctcactagtgccctcttcataaatgtattgaaggtttggctaaattgtatcaaatttgtgattaaatacaaatgtgaatactataaaatattacaaaggacaatctgtatactatgctatgccagttttacaattttacaatgacttacagatgccataaatatttactttaagggagtaaaataagttataaaatcatatttaaggacacctaaatccttgaataagtttaaaatggtattattatttacatatgaagtcagctgactattgaaagcttatttttcaataacagaaatatatgcattatctaaaacacatattccaatattttcaagaaacaaaatactgaattaaatcatctgtatttaaatgtttatctattttcgttataaatgtccatgaaaatgcttaaaattggtttatttgatctaaaaagttaatatgcaatttttatttttaatatatcatttttcccatttattcttttctaaataacacgttcatccaaagtagatgactgaagaaacaaaatgctgttttctttatgaacttgtaatacatttcaaaaataattaagatattgttcaaggtgttgaagtgtacaatataacaaattgcatttgcagttgaatagtagcagagtagaagctgaaaaaataaatcatgtatcaaagtagcttaaaacagatgatagcagagcaaagagtttcctgccaacgccctctaaacatcggttcttttaggcttttgtgctggtattaggtttcagttatagacaagacatatatatctgaccttttcctttccttttctacaccttggagtcaaagtctcctataaaaggacatttgcagcaagtattttcagctggagtaggaggaaagggcaggagtaggagagcgttatgatcacctcttgccaaagcagtttcacttgatttgcaactggtgtttggtaaagaattttgctatgcaaaaatagtgtcttaattggattattttaagacaaagtatgcatttttcatgtcgtactagtattttattaataaggctagggaaacctactaaatccctatactaaagtgaatttgattctctccatagaaacttaaatcctcagggtgatacaactcagtccttctactgcagcagctcttttataaatgcctcccaaagctccaagaaggaacaaagaatgtgaccagtaagctcacaccatgagtctatattgcagaatatagactttgttcaacaaaactgcagatgctctgttgaatccactggagattgtcctgatactaaggacaagtatgtaagttaatgattttattaattttaacatttttaaatgttttcctttggggaattctaatttatatatcaatattcaggtaatatttgctgaaaacacaaactctgagaatcaaaatgatctgcattcacattctcattttctattataacatagagacaactactttattatctttttagaaactttcgcaactactttagtttcttcctaattttataaattaatctatctcaaaaaactttgctcaaaacagttagtaatagctatcaacttcagaaaaagtgaaactttaggccgggcggggtggctcacgcctgtaatcccagcactttgggaggctgaggcaggcggatcacgaggtcaggtgatcgagaccatcctggctaacatggtgaaaccccatctctactaaaaatacaaaaaataaccctgtctctacaaaaaattagcctggcgtggtggcgggcgcctgtagtcccagctactcgggaggctgaggcagcagaatggcgtgaacccgggaggcggagcttgcagtgagctgagatcgcgccactgcagtccggcctgggcgaaagagcgagactccgtctcaaaaaaaaaaaaagaaaaagaaaagaaaaagaaaaagaaaaaaagaaagaaaaaaaactttaaagataacttttagaaggaaaatgaaatacagaaataatacatctcatttacacttaattaaaaataatatgaattgtcactatttcctatgaaaacatctcatgccaagttcttttattaagcttggattttaaatgttatatttgagttgaaactggtagaatcttagtaaaactataacaataagaaatttttatattatatatgtaatatacaataatcacatttaattccatttgttagtctattctgattctttagcaggttgattcataatttaccaacttggatcagaaatattttctattcttagcttttgctgtcagcagagataataataatatagagcctgaacaacaaaggattgtgtattgtttcaatttaattaaagttgattcgctgctttaagagagactcacattttatattttatattttttaattaaaaagagaatgtagatatttgcttttccaaatttcccataagataagaaaaacatattttttcttaattacacccttgctaagtcacgctagctgcctgaccttggacaaaattcttaacctctttgtgtctcattttcagtaactgtgaattaaagataataactgtagtatatttctcaagggattattgtgggaattaaataaaataatcctctaaaatgcttagtacagattctggaacataataagcagaaaaaattaataacaattattatttttatttactgtattatgtgacatactttttctttatgaccttcaggagaatttctactcatcttaaaaatgtatatagatattgatctgcagagaaatatatctgttatttcaaggtctgtggattacataatggtcaactctgattgatttactgattaaacaaaattttaaaacaaaaataaaaatattgcagctatgttggttttaaccattctaaactctgatgaaatttgctttctgtttggtttgtgactaggaagataaacattatttattaggaataaaaatttctggtgtctaaaaaatttcaagaggaaaactgttagattctattacaattaaatctgttaagatttaattgcaaatatgtaaataatgcaaatatatcttagggcacaatttttgttctcattaacttacccattttacattttgagaacagtaatagatgaaatacttgtcaaagagaagatctaagatggtttaaagaaaatattaaatgaaatcaaacttacttgtcaagctccatagcacaacttacaagtcataaatcacactctgtatgacagctacggaagggatctgggtagtaaaacaaaatgatggattttatctttcctgtttttgagttgtttttttaagaaaatccttttcagtagatttgttaacagtacataatgaaaatcctataggcataggccccccaaaaaatcacaaggtatacaacacttgtgtcatgcatcacccagaaaaagaatcacatacaatcccacagctctgaaatacaggaatccatgattcttgaatgcaaacacaacctacacagcctctctgtttccaaagacatgcactgaacctcccacatctcccagaatacaaaatacagaagccacataaactcaaatacacaaagaaccacaaactatttttatcaaatacatataagtccacctcacgaactctgagaacacacatatgagtggcaacaccaaattctgcgagtatttcacttcacaacagacacagaggaccactaagtcttaatatacccaaaacccctcatatacacactcgcaaactacccatgaatacacaccccaccctcccagataaaacccatacaatgcaaaaaaaaccccacaaaaacaccaataatactctaatatacgcacacaactttcatatacccatgggcacataaaaactcacaaaaatatccccaatccctgagtgtataaatcccccgaaacactatccaatcaatatgctgcatctccagaatacaacctcctcacctcatcccctaaacatgcccaaacacatgtacgaacatcctagcattctccaaagaaatacactttaaatactaacaatcccgtattctataaatagacttagataattcgtctatctgctgataaatatacacacaaaccagcatatacacccaagatgcatggaaatatctccagcatatcatttataaatacccataaaaacacttcccaatcccaaattatcccaatctagtatgaaccagctcccacattgccaagtactaaccaataaccatatcacatacctctaatacatataaattcaactctcccactctcctgtataaaaagagaaccccatctctctatcagacacacacatactaaattcccagaatatataaccctaataaccacttactgcaaaacagaagcacatagctccacaaaaccttcatctaaactgccacgcccttaaatgcacacacaaactcaatactcatgtagttgtctacatgccctaaatatacccgtgattaactaacacgccacaaatatgcaaacatgccacctcatatccccaaatacacatacagttccacaatactgcccagcccagttatgaccttctttaatctgcaatctccacacagacacaaccaacccacacacgtgaatacatattagattctcaccaattaaatacatatcaaattccaaactaagaattcatataaacacattttcacatacacaaaaccacccccacaaatctcacaccctccaaaatccaaaataaatcttcctgacattctcaagaacacactaacccaaccacccaagataacacacgtgtgtgcagtaaattttagatacatgtgtagcctacaatttacaaataatataccactactttttatttgtaaattccacataagtaagcgattctcatggaagcttttcttgactttggccacactcttgcatccacaaccaacttgtgctaccaagtgaacaaactatgactaaaggcctgttcttccactttgcagctgctcctatcagtgacaaatcagcgtattagaacatgtatgctggctgatcattctgatcaagtcaacaagcttcacaacttactcaatgaggtcgtccgtgagaacttcactgttttaccaggacaggagctacttctttgctgaactgcatcacggtttcaactgctgaggttttcttcaagcttttgcattgtttggaatgtgaaaggcacggctgagacacacttcggcattcccactgcattgttacacctcccccatcacttcaggtccaggtgagcaagggaaagaagcgcggcctgggcgtcccgcagggcccccgctaggaaagctatgaacgctcccgccttgagcgcagccacaggcctgctctgatcacaatgtggggtcgccccgcggacactggtgaccagtgggagcatgaccaggaggtgattaccttctgatcacccttggctttatttttaggtaacaccaaggacgccatgatggcacatgcctgtggtcccagctaccccggaggctgaggcaggagaattgcttgaaccgcggaggcagaggttgcagtgagccgagatcacgccactgcactccaacctgggtgacagagtgagactccttaaaaataaataaataaataataaataaacaaataaataatttaaaaaagtcattgctttatttttaaaaaagtaatagtttcaaaatgtatacatgtaaaatctaactgggaatactttgtacctacttgtagcccaagattaagtttattctcaattactaggaggtttgcacaatagagtacatatttaatctgtatgactaaaagcctcattgtcaatgtgactgtgtcatcattatcacatttgtgaatctcctgattataactttcacagatggtctatctacagggttctgggataagaaacttgctgtctgtctacagaggaagctgttttcacttccagatagttctgaatatttgaaagtacttgctgattcagagtcaaattatgtcttgctgtaacatccacaatttctgaacttacatttgagataaaccaagattagactaaaccatgccttcaagtgacagactctcaaaaatgtgatgcattttttttcaaaaaaaactgcacgtccaggatactctacctggagaaaaacatagctctcattaaccttgtccagacattaaacttataagagaaaatcattattttccttgtagccaaattattccgctaaattgtttttaggcaggattaataaacctttactgtaaagggaaagaggctaagatcttaggttttgtgggccatataatctctatacaactgttcaactctgctgttgcagtgagaaagcatttatagacgatacacaaatgaatgagtgtgtccatgctgcaataaaactttatttacaaaaccagtctattggctggatatggcttgcaggccatactttgccaacccttggtttacagcctggctagctaaacactgcttgttgtagtaaaatcttgctttttaaaacatatgtctctcatcctagcattgtcattacatgtgtgtggtttattgttgaatatgtaatatttaaggatctttcctatttagttttattgactaaaagctgtttcataattataatacacagacatctatataggtttttattttatcattcaacctattagctaatccttagagttgtttcaattttcatgtgtttgacagatgaacatgtctaaaacactgatgaaaatgttaccagaatataaacaaaaatgaatttttccggttaaaaccattttacttgttagtaatatgtaactattaaccattaaataatttaccaaattattccattacgtaatccatattgctccttcttgtccacaagaatatagtaaggtacattatcaaatacatacctctgactttagtgggcatttaatgtattattagaggatcccaatatctgtctttcttaagaaaattaaactcatccctagtgattatacactttcttcatctaacactataatattaataacatttgaaaaagtaatgtcaaataattaacactagatttacagagtatttttagacagttttctaaaattatctgaaaaatttggccagaatcagtgtaaaattcacatctgagcttatggaagccaactttattccactctaaaagtacaacattttatagttttaattttatcttttaaaatgttttaacctaaaggtagtggaagacgttactaaaggaagcttaggtagtaacgtatttgtcgtctcagttaacacaaagaccatagatggggcagatctgcaggatgcaaaaactttcttttttctcacctcatagtagccatatggctactgcaattctctggtttcatgtgcttacaaaatgtcctttagttaaaaacaaaaagaaagagaaagagagaaagaaagaaagagaaagaagaaggaaaaaagatagaggaaaaataatttcttcatgtgtctatttaaattaacaaagacgtgaattgtcccagacctccctgtgatgattaatttcatgtgtcagttttactgggctaagggttgcccacatggctgataaaacattatttctgagtatgtctgtgtttccagagaaattagcatttgaataggtaggctgagtgaagaggatcatcctcaccaatatctatgggcatccttcaatctcttcagagcccaaataaaacaaaaaggcagaggaagggtgaatttaatctgtcttcttgagctgggacatccatcttctcttatcctccaatattggaacacctggtctatgttggtaggagtgtaaattagttcatcataaccttgttggcactagggaccagtttcatggaagacagttttttcatggaccgtggtgtagggaagatggttttgggatgattcaagcacactacatttatttatttatttatattattattatttttgagatgaaatctcactcttgtcacccaggctggagtgcagtggcgcaatctaggctcactgcaatctccgcctcccaggttcaagcaattctcctgcctcagcctcccaagtaactgggattacaggcacctgccaccacacctggctaagttttgtattttcagtagagatggggtttcaccacgttggctaggctggtctcaaactcctgacctcaggtgatccacctgccttggtcttccaaagtgctgggattacaagtgtgagcaaccatgcccggcacaggcacattacatttattgtgcactttatttctattattattacattgtaatatataataattatacacctcaccataatgtagaatcagtgggaaccctgagcttgtttttctgcaactagaggtcccatctgggaatgatgggagacagtgacagatgcacacactgcagggggattgcattagatcatcagacatcagattctcataaggagcgtgcagcctagacccttcacatgttcagttcacattaagattggtgctcctatgagaatctaataccaccattgatctgacagcaggcaaagctcaggcagtaatgcaagtgatggggaatagctgtaaattcagatcaagcttcgcttgcttactcactgctcctactgctgtgtggcccagttcctcaccaggccatggacctagtccatggcccacagggttggggaccccgatctaatgtgacaactctggaaatcagattctataccccctatttgttgttgctgttgttgctgctgttattgttgttcagtgtctaatgagctttctgaaataattttgtagtctgggactactcttcaacactcagccaggcagtttacatctctgccttagccttcacttcctgcttgcccagagcctcaaggccagtcagaggtgagagctttgagccttcccaggtctttactgaacatgtacgcaggcctacacttgggagtagcctcatagatttctaggaatcattctgttggaattttcaaagcccttatggacatctcattctcctgttttacttttaaagctttttagttagcctattgtctgcccaaaatgttatctacaacctcatacaggcaccaacttgaataacggcctttaaatgtttttgacaaatgccattaaggaaaaggctttttcgttaagtgagctcttaggacagaaaaagacatcctggcagtgggatgtttctgaaaaccaccagccaagtcaaatgacagttctctgggaatgaggctttgaaggaaatccagccccattctgtctttccagtggctgccaggctattggtcttcactgtaattatgggctgttaattttcaaggctgcagtggagccagcgaggagaggatgagaatagaatagggcaagttaaaaataccatactgcttgctgttcttaatgagatttttcattttatttatttgtgtgtgtgtatatatgtacacacatacacacacacacacacacacacactgaatggaaaataaatcttggggccccaaaatcactaagctaaagggaaaagtcaagctggaaaagggttagggcaaacctgcctccaattctattcaaagtcatccctccattcactgagataaatgcatatcggattgcctcctttggaaaggctaatcagaaactcagaagaatgccacttgtcactcacctacctgtgacctggcagccttctcactgcttgtgctgtcccacctttcttggcagaaccaatgtatatcttccatatattgattgatgtctcatgtctccctaaaatgtataaaaccaagctgtgccctgactaccttgggcacgtgtcatcaggacctcctgaggctgtgtcacaggtgtgcctcctcaaccttggcaaaataaacttcctaaattaactgagacccttctcagatattcaaggctcacattttggcaaccatgaagggattctgggtggaggctcccctgacctttgacaaatctcctatcagtgctcggtaccagcttgaactatctttatggctcaaaccaatagaacaatttgccgagacaggcctggaagcaccccctccagagaatcactgatctttcaaaacttggtcaagatctaaagtttattttgcagtacaactccttttttttggagttttactatcttccaacgcaagaaaggcaagtttttcctgctttgatgacgatgaaatgcaggtaactcctttatggagtttgagcttgcttccaacggggaagacaaatgtgagtttcttccttcttctagtaagggaggagaccacccctcatatcgtcttatgcccaatttttgcctccaaagaaagaagtaaaaactaaaaggcagaaatgaaatccacaggcagacagcctggcgccgcaccctgggcttggtagttaaagatcgacccctgacctaatcggttatgttatctatagattacaggcattgtatagaaatgcactgtgaaaatccctatcgtgttttgttccaatctaattactggtgcatgcagcccccagtcacataccccctgcttgctcaatcaatcatgaccctctcacacgcacctcttagagttgtgagcccttaaaagggacaagaattgctcacttggggagctcggctcttgagacaggagtcttgccgatgcccccggccaaataaaccccttccttctttaattcggtgtctgaggagttttgtctgcagctcgtcctgctacactaggatggtaaagagcagtcttcagcctgagacccatcccttacctaaggatgggtaactaaactgggggttgtcttggctaaagttaagattaacaaccagctggttgtaatttctctttaccattagagcactcagtagttggataagttgtgccatctttgttttgcttaattgtttttgttgttgttgtttgtttgtttctgtttttgttgttgtttcagtctttttgccattgggattgatcaactctatccgacttgatcaaatccaaaggaaacttccaaattatggggaacaagacctctgaagtggctaaatttccacactgtggtgggggagaaaaacagccaaaaaaggggaaaaaaaaaaacagggaagattttttactttgactacttaaggggctttatttacataacaaggccacctttttgctagccaggccaaactgaaagagcaatggctgtcactccatactgcagttccatagctaagggctctggcttctttttttccaccacgacagcttgggtgtggttcctaaatcaagccattttcggtttgatacttggtacttctgaaatagcagcaatttgttctagctgaattatggtaatgagattttaaaagatttttttaaaggagctcaatgattaaaagtcagcttaactaaaagctaacatccaagatgtgtgtgtgtatgtgtttgtgcatgtgtgtgtgtgtgtgtgtgtgtatgtgtgtgtgtttgtattgaaaaggccttcacatatttttttttttctcctaggaccttgtctctcttttttttttttttagttaaagatttttttttctcagttgactgagttctgttttttgttttgttttgttttgttttatttacttctgctgcctctcctttctcttgcaccctctgctgcttgagggacctaaactattatagtttataatagcctggctttccttcaagaaagcagagaaggcaccagactcctttttggggagaaacctgtttttccttatgaaaccccaagagtgtaagcagataagttcatctcagctcttaaattgcctgcttttgtattgtgttacctgacttattgactaaaagagttgttgcaccaaagcctcctctggtttttaaggaagagtgtagtttacacattagaagtgtcttcgtttaaaaaaaaattttaagtgcactgtaaaagcatcacatggtctagcctcataataattctcccttttgggagattcaggattcagtgtgggctctgcccagagctcagagatctagtcaaaagacaggtatttcctacataaataaaattggtctcttcatataatcctatgacagatttcttttttttttttttttttctgagacagagttttcgctcttgttgcccaggctggagtgcagtggcgcagtttcggctcactgcaacctccacctcccgggttcaagtgattcttctgccttagtctcctgagtagctgggactacaggtgcccaccaccacacctggctaatttttgtatttttagtagagacggggtttcaccatgttgggcaggatggtcttgatctcctgaccccaagatccgcctgcctcggcctcccaaagtgctgggattacaggcatgagccaccgtgcccggctatcctatgatagatatctgtaactttatgtttgatttggcatccctcttttgttttgttttgttttgtttgagacggaggctctctctgtcacccagcctggagtgcagtgacacaatctcggctcactgaaacctctgcctcccaggttcaagcgattctcccacctcagcctcccaagtagctggaattacaggcatatgccaccacacctggctaatttttgtatttttagtagaaacgggttttcaccatgttggccagggtggtcttgaactcctgacctcagatgatctgcccgcctcgacctcctaaagtgctgggattacaggtctgagccactgcccctggtgtagtacatggttttactgcatgtgactagtttacatgcaactagccatgcaagttcagtaacccaaggcggtctataccctgttcaacaagaaccatctactaatgacacttctggaagtctgggcaatgtcaacttgctgtaaaagttcccaaatgctctcaattatcatatgataacaaaggtctcaaatcagtaaattttgagtggccctttactaggaataatcttgaataagctagtactgccctccacaaccacaattaaaaatatatcggtattggttttctcttcagttcaagaatcatgtaaatatgtaatgtagaaaatgaggatttcccatattcccacagaatcacaaagatgatcactggtaatatgcgtgctacatatatgataccaggtttattctactctttttttttttttgagacagagtctcactctgtcgcccaggctaaagtccagtgctacgatctcagctcactgcatcctctgcctcctaggttcaagcaactctcccacctcagcctcccaagtggccggaattacaggcacctgccaccatgcccacccagctaatttttttatatttttagtagagacgaggtttcactaagtagaccaagttggtcttgaactcctgacctctggtgatccacccacctcggcctcccaaaatgctgggattacgagcatgagccaccatgcctggccatttttttgtacttttatacaattatatgcttgctttataaaaatgaacttattctacatatacatgttattacattattaggacatgttcccaaatgacatattacattttcatcattcttttttaaaatattttttcgtgagacagtgtcttgctctgttgcccaggctggagtgcagtggcctaatcacaggtcactgcagcctgaaactcctgggttcaagggatcctcctctctcggcctcctgagtagcccagctaagtttaaaaaaaatttttttttggcctggcatggtggctcacgcccataatctcagcactttggaaggccaaggcgggcagatcacttggggtcaggagtttgagaccatcctggccaacatggtgaaacaccgtctctactaaaaatacaaaaattagctgggcgtggtggcaggtgcctgtaatcccagttacttgagaggctgaggcaggagaatcgcttgagcccaggaggtggagggtgcagtgagtcgagatcatgccactgcactctagcctgggtgacagagcaagaccctgtctcaaaaataaataaataaataattaaatatatatatatatttaattatatatatatatatatggagagacaggtctcactatgttgcccaagctggttttgaactcctggactcaagcaatcttcccatctgggttcccaaagtgttgggattagaggtgtgagccaccatgcccagacattttcatcatcctttttttttgagacggagttttgctcttgttgcccaggctggagtgcaatgtcacgatcccggctcactgcaacatccacctcccaggttcaagtgactctcctgcctcagcctcctgagtagctgggattacaggcatgagccatcacgcccagctaattttgtatttttagaggacacagggtttctccactgtttttactagaccttgatcacatcaaaaagattgtgtctcttccatttattgtgcagcttgtacacaattgacacaatgaggagctcagcaaaggacgcagagtgacagcatcctcccttcagtggaatggccatgtctagacacctcttaatcactcccgagaagtagggatgggttcggtgtatgagaataagaaacggagcctccagggttgagacaatttgcccaaaacacacctcttgtgggaagtacagttgcgatcccccaggtctcttgggcttgcaggttcctgctctcccgtgggcccccaggagatgttggctgccaagaggaggaggaatcctcctgggcagaggttaacttttgccactccaggatttgcccaccctggggtccctgccgggaatgttcccccagcaccaccctccccatgccgcctcctaactggctgtgtccttcccaccattcagcaaacacatcctacatccaggaccagccccttcatctcaggaaggctgccatgggactcccagaacccccatggctcctggagccctgagggaatcacatcttgggtggggagtgatttgttttctcatccagtgcaaccttggaggtaacagacaagaatgtcctgtgatgcgaagcacttattgtcctgacctctggtccagtgcccttcgctctaagcacatagcatccccaggctgttcctggaggtgtgggctggggtttgtagggactagctggaccagctgggccaggggaggcagccatgcccggggcacatagccactgcccagagctgcccccagagctgggagccatcttgcacatggtgctgtgagatgccctccagagaggaagatggaagctgtctccgtgccccgggactgatgaagggcccattccaggcctttgggcacccgggctcgctacccttctgggagccctgtcctgtgggccaggacaaaggtgccctcactggtggcattctcagaagctcagccactccccacacatgcacataggggcgtgcccacaccaagccacgtgtgggtgtctggggacaatgagtcttgggggagggggtgggtcccttccagaagggtctggccaaagtccagttatgaaggtgagctgagatgggctccctcaaaggagccatagtgtggggagccccgggcagagcccagagagaaatgccagccccgagaccgagacacgctccaaggagtgctgccaagagcagtagacacagccgctgaggcccacggggcacagtgaggctgtgggagagggtggcccctctgtggccatttccctgcctgtgctcacatcccctcctcaggcctgtctcaccagctcttgcagcccatgacccacattctgtctgactctccttcctctcctggctacagggatccccagtgcccctcaccattccttctggtctctcctctgcctcccggaactgttccccaggactctctcctgggtcagcccttcctcccactccacatcagtggttccgaaccccggatgcctttgggatcagctgggtgcattttaaatccttccagcccagagccctgaggcccaagtcacccccgcctgctcctgtggcaccccttggatcagccaaccattttatcatcatccatcacgtcccctgtcaccaagagcctctggcatgttctgttgtccccacgcccacactggcacccctcatccaccaacctgtgcccacgtcctgccttgagcctgtttcccctcctgagtggtgtttcctcactccaagtgggcactgaggcagctggcagacctggctgtgagcttctgtcccttccagaaggatcctcccctccagattacccagtcaagcttgaccccatggtgccactgagacagaccaaaagagggtattgaagccacacagtcccctgagccccactgagctgcaccagctttggagctggagacagcccgggagactgagcactgagtgctaggtcaccatggagaaatcattgtaaccttccctttctcccactcttgagggccctgggggaacacagcgcacaaggtgagtggtggaagaggcatgtgcttgggtgcttggcacctagccggggttcatttctgtgggttcccaagatcccagccacatgtcccactcctgcctcacaaagtgacaggaactccctgttctggaccctgagctgagtgtcagatgctgaccatggagaccctgactttgaggggagcacagactatcaacacagtcctgtgaacacagagagaagagtacaggaggatgctgtttggagcacaaagggtgtggtgtcgtctactctgggacctgggtgttggaggaggctgctgtgaagaaggaaccttccgctgggccctggagaatcacaagcatcataggagttagccaggtggaggttgggggtggaggcatggggtggacatggcgggaagtgaaagtgaggtaagggagaacttgagggcccttctgcactgacagggtgagtgcatgggacagggtgagtgtgcactggaatggagcgtgggtgcaagagacaaggcatgtgtgcacaggagggagcatgtgtgcatgagggtggagtgtgtgcacagggatgctgtgtgtgtacatgaggatggagtatgtgcagaaggatgaagcatgtgcacgcagggccagggcatacgtgcatggggtgtgtgtacctggggactgagcatggtgtccagcctgttcctcctaagtagtgggcaccagctgattcctcaatgaataaatgtcagccagaaagagaggagatgcacctacaggctcacagcaggagaagcataatgcattggtgagcgtgtttccacaggggacaaggagggtggcggaagaggcgtatgggtggggtgctgggtacctagccaggctgtgttctggtgagtgagcccaaagggtctgagatcagctgcaggcatcctcatctctgcatctggaccactggacctcagacatctcagggagctgttgagtaggcaattggagagaaacttctggaactcaagaggaggatgggggtggagccatggcctcaggcatcatcccaggggtaatagtgaagccacagatgtgcctgagagctgcccagagagaagccaaggccatccaaggcaaagagcagacactcagaaaaccaggggagcactccgctgggaaagacagggccaggggtttgcaagacacagcagagcgcaggctacgtctgaccagtggctggtgagattcacagacaggggccactttgggccactgcaggatgtggagggtgctgggcgtcaacgggttgccctggagggtaggagggaggcaaacagctcctgtgggcaacagcggtggggcaaggggctggggtggtggctgtactggaaggggtgagggccagaggacaaggagggagcactctgggagtcctggagaggagagtgtgaagacacaggagaaagagggaaaggagatcaggcaggaaagatgagggaggggagtgggagccagggcctgactggagactcgacttctgacttccgacttccgacttccgacctccaacttccgttaggaagtgaaacaaaggcgaaggccctctctgtcagggtactcagaggaaaggtcagggaaccagggcatgtgggagaagagtgggagtcctcccagtgttgtggggaaggtgtctgtttagctggaggtgagattctaggtccggtgtcggggaggtggtgagtgtggaggccgggagattagaattagtcattgtggtgcaaaagggaaattaacctacagaagctgtccagcgccagcgtgagtatcagtcagaggctttgagcaacccagtgctctagaggaggtaaagtgaaggcttccctggtctctgacatgaacttgttctgactccccttgtagaggcccaggaatgtgtcctgccttgtccacaggggaaggcctccaccctgctcagcctgcctggcagaaatgtcccccagccctcctggagccttagccccctgaatgtgccccacagcagacagctatcagattcctccacaggtgttcactctgtggccgggcaagtcagccaatttaaaccgtatatgtttgcctgtgtgtatatgtttatgtgcgtgtgctttgggatgtatgtttgcctgtgtgtcgatgtgcatgtgtgtgcgtattatgtatgtgtgtgtgtgtttgctgatgtgtgtgtgtttgtgattgcatatgtttgtatgtgtgcatgtgtgtgtgtgagtgtgcatgtgtcagctttgccgtctttccttcaacctctggctgctgcagatggtggagtgagctgaagatgctagagtgagctgaggctggtggagtaagctgaggctgatggagtgagctgaggatgctggagtgagctgaggatgctggagtgagctgaggatgctggagtgagctgaggatggtggggtaagctgaggatggtggagtaagctgaggctggtggaatgagctgaggatgctggagtgagctgaggatgctggggtgagctgaggatggtggagtgagctgaggatgctggagtgagctaaggatggtggagtgagctgaggctggtggaatgagctgaggctgttggagtgagctgaggatgctggagtgagctgaggatggtggagtgagctgaggatggtggagtgagctgaggctgttggagtgagctgaggatgctggggtgagctgaggatggtggggtgagctgaggatggtggagtgagctgaggctgttggaatgagctgaggatgctggggtgagctgaggatggtggggtgagctgaggatggtggagtgagctgaggatggtggggtgagctgaggatggtggagtgagctgaggatggtggagtgagctgaggctgttggaatgagctgaggatgctggggtgagctgaggatggtggggtgagctgaggatggtggagtgagctgaggatggtggggtgagctgaggatggtggggtgagctgaggatggtggggtgagctgaggatggtggagtgagctgaggatggtggggtgagctgaggatggtggagtgggctgaggatggtggggtgagctgagcatggtggagtgggctgaggatggtggagtgagctgccctgctagacactccttatctgctcccagcacacaacatcctgtttctggtttccatctcggtcagtggggctgcagggcagatgctgctcagatctgtctttggagttattccactttttgtcttgaactttctggttgtgtttcatttttcattaatgcattttagaacttcggtccttttaaaactctgcatttgttataattagctgttcttgtcatatagttttattcctttatctttttttgaacattttatacacccttatttcaatgttccttttagatcactctattctctttactctctgggctttgaatctccttgtttcttgtatctgctgcctctctttgggatacctgggagtttttcctctgacctcgtcttcagtaggaaatgattttccatgagaatcctggttcccctggatgaggacggtgtctcctggggagaatgtcctgtttggttttgctggagcctggcaggttctctcagttgcagatgggtgtaatgttagctcctcagctcagagtttctgcaccagctcaccgcagacttgggccctggtttcccacagatgcccagggcagggggccttcctctgtgctaggtgctgctccgtggtatttgttccacgagtctgcaaacattgttttgaagtcagtttgtaacatctgcctagtaaacaaaagtaacacttgtgtctcctggaaaaatggactgtcaccacccccttctcttcttcatcccagtcctcagggaggcccctgagccactgatgtctgaggccaccaaggcaggaagaccctggggagagggtaaatgggagatgcctctcagcccctgtgcctgctgtcccctgggccccagggtagagcttctgcagactttgttccttcccatttctgagacagcctgagctggggccaccctccccttcatggagtcccagctgtcaaacaaacacctccagggccatctgttctctgagcaagagttttcctcctgggatgcccccacccacccacagaagcagggatatagggaaggaaggaccaggatttctggttgcaataattgtatccgtgagtttgagactcccaggttacctttggacttatgagctgaactgctgggcattctggcctggatgtccctagagccccagaacctccacaaggatcatgagcagggggtcactgccccagaaccatgagggcacccacatggtctaccctggctcctcactcatcagaggaaatgacgagattccaaggtcccctccggtattgcaagctggcctgagccatagggtcctgtcccagcatggcatcaaatgcctggagctcatcctgcaggagcagccatggcggagcccccaggtgtgctgggcagggaggatgtgtggaatctcattcactctggacagctgtggcccccaaactacccataacgatgcagtccagccggaactggggccttttggcttcataacatgttggagtctttccccagagccccattgtcttttagaaattaccacttagagagggtagtgcttctgataaagacaggcatgcactgaattgtgtcctccccaaatttatatattaaagtcccaacccctggttcctcagaatgcagctgtactgtggttggagaggatttgtaaaggttaaattaaacaaagtcattagggtgggccctaatccagtacgactggtgtgcttataggaacagtttaggaaacagacatgcacagagggtaaagcatgggaggacacaggaggaaggtggctgactcggaggaaacgaccctccccacaccttgaccttggacttgcagcctgcagaattctgagaaaaaaatgtctgtttttttgtcacccagtgtgtgggactttgttttggccacctagtggactaatacaatggctttgctgttaacagcccagacccacgtttcctgcacataaggcatgggactcactcatcccctctgcccaggcccagccctggtctccgagctgagttcactgggtaggctgcaggcagcaggcaggagtggggcctgatggaacgggcgatgctgaggcagtgagggcggcagagggatgctcactggctcatgtggctcagcttcgtggaagcatcaggagcaggagtgaaagaagcaggtgacaggggccactcatggggagacagatgggcaggctcctccacatgctggagacaactttgggggcacctgctccacctgttgccacatcctcaaacttccccataccccatgctggatccagcagcagccctgattgtatggtatgaccttggtggtcagatcaggcatggacagcttgacccagactatgggatcagaatctctccccagcaacgtggccatggggtcatctgaacagaggatgagcaaccgcagacttcagggctactagcagccaagtacacagagaggcagaggtggggagaggggagcaggtgcagagggagagaaggggcagagctgaggccgcatggcccagggagcagggaaacctgaaggagaccccaagcaggggtcctgtgggctttccaatgtctggtcctgctgaggcctggctgcccttgtgatcatgagctggcaacctacagtcactacagccctgtccttctggtctcctcttgggtcctgcctctgcacagcctgtagccaggctcaggctgggatctcccatatggaccctaagacgggctttcctatacttcccatggaaattctccagctgatagaagaagtgaacactgatagaagatgaacagctgatagaagaagtgtgggggttttctcaagtggtctgtaaaatttttgcaaggtttgtggttcatctcaaagattcgtaatttcgaaatggaagtcttaatagttagggaaatttttcacataccccgaagggctcctctttctccagggttgggtcaaagtcttgtgtccagaagccccctggtcggcagtcctcttggcttcccctatcacccagtgtccagcctgcatgggcccttcagtcccaggggccatggtgaggctgggtccctgggcctggcaccatctagacaccccttggtggtccagtgatgtgcaagctacatctctaaccccctgacctctgccttctctacctccctgcccactccctcattcagagacactgagcgtcacctctcaggagtttccatcttaacgcaagatggaagagagtttcacttcaggccactgttgcccactgtatcttagtccatttgggctgctctaaagaaactaccacaaactgtatacttttcaaacaacaggaatttattttaaacagttctggagtctgggaagtccatatcaaggcagattgagtttctggtgagagtcagctctctggttcattgttagcatcttttggccaacaatgtctcctgtgttctcccacagtggaaggggtgaggcagccctctggggcctcttttataaagacactaattcaatccatgaggctccaccctggtaacctaatcatctccccatactcccacttcctaccatccctttgggtttaggatttcaacatatgaatctttaggggacactaactttcaggtcatagcatttggacttacaccattgcctcacccccgcccctctaattcttgggccttcggactcagactgagtcacaccactgacattcttctttctctagcttgcagatagcaaaccatgggacttctcggtctccataaccacatgagccaattcttaataataaatctcctcttacatatacatatacccgtatatatcctattggttctatttctctggctatccctggctaatacacactgcaagcacctgtgcaataccaagggcctggccatctgcttgaaatgtaaaatagaaaacacacccccccacacagagagagggagagagagagagagagagagaccctgtccagagccacccacccagtgcctgtccctagaccaaggcccagtccccttcacctgtctccatcataagcgtcaccagcctgtctgacaaactgcccagcaaagttattgacattggcctggccgcctggggatgcaaggccctgaacattgtagagaatgagatgccaggcctgatgcacatgtgggagctgtactcggcctccaagccactagagggcaaccacagtgccagctgcctgcacatgaccatggagatggccatccacattgggtccctcatcaccctgggtgccccagcagcaacatcttcctcaccctggaccatgtgttggctgccattgccaaggctggcattccagtttacacctggaagggcaaaagaacgcagagtacccatggtgcatcgagcagtcactgtaattcagggatgggctctcaacattattctggaggatgggggtgaccttgccaacctcttccacaccaagtactcacagctcttgctgggcatctgaggcacctccaaggagaccatgacgggtccacaacccacacaggatgatggtcaatgggatcctgaaggtgcctgccatcaatgtcaatgactccctcaccaagagtgagttcaacaagctctatggctgctgggagtccctcatagatggcatcaagtgggccacagtggtgatgattgccggcaaggtagcgatggtagcaggctatggcaatgtgggcaagggctgtgcccaggccctgtggggtttcggggcccacgtcatcatcaccaagatcgaccccatcaatgcactgcaggctgccatggagggctatgaggtgaccaccatggatgaagcctgtcaggagggcaacatctttatcaccaccacagcctgtgtcaacatcatccttggccggcactttgaacagatgaaggatgatgccattgtatgtaacactggacactttgaggtggagatcaatgtcaagtggctcagtgagaacccttggagaaggtggccatcaagccccaggtggccgggtactggatgaagaatgggcgccacaccatcctgctggctgagggtcggctggtcagcctgggttgtgccatgggccaccctggctttgtgatgagtgactcatcaaccaggtgactgcacagaatgagctgtgaatccacccagagaagtaccccattgaggttcatgtcctacccaagaagctggatgaggcagtggctgaagcccacctgggcaagctgatcatgaaattgaccaagctgactgagaaacaggcccagtacctggggcatctcccctgattgccccttcaaggctgatcactaccgctactgagagccaggcctgcatttcaccttccagctgctgttcttgcccaggccctgcctctccttcttaagagcgaatggcaccaactttgtgattggtttgtcagcatcccccatggactccccagggccgttcactcagtttttggcttctgctgcacccctcatactattccaagtgagtcaggggaactgagagtcccctcctcaagcctggtcatggtggaagtatgagggagacagccacagggaactgtgagctcaatggtcttggaactgctcactaagtcagtccttccttaacctggatgtcagcagtggagtcgcaaagcccacgtactttaccatctaggccttcacctggcctgtggacttataccctgtgcttggtttatggttcagtcattcctcagcccgtgacagatgagaaggaactgtattgaagggcaaggaggaactgtttcaattttcctgagagcttggcttaatgctggaccttctcttaaacctcgtaacaatgagattggtactttcagtccctgtttcacagggattagaatacactcttaagggacaactgagaaagaacagagaagtgacagccagaggttgagaggggccagaaaagcataaaagcaggcacagatcagccaccactttgtaacaagagggttcctatcacaaccttgggtcaaaaagagaataatttggcttataatgtttataatgttaaaagaaagcaggaaggtaggtaaataaaaatctcaatgccattaaaaaaagaaggaaagaaaaaagaaacagagagggagaacacaaaacggaatgaatgtttcaatagatatctgaccaggtatgcaaattacccagcccagcacaggcagaagcactaggcagtgcttgagacatggagttcccttctgcccctctgtctccctctacatgctgggcctactcagggaatcctggtgagagatggagttcccttctgcccctgtctctctctacatgctgagcctactcagggaattctggtgtttacagaaggggtcagaggaactgcatgaagaccacagctttgtgtagacacacaagcttcaacacaggcatgtagatgtgtggttgtatatgtgtgcatgcgaggagttttgcagtcatgcctggtgggagtctgggggaggctcctggcttcaaagagcccaagccattagcccaggcttggagacttgagctgagtgattggagggaggggctgagcagcaagctcaggaatagcccaggccggccaggaggacagtttacctaaccgtcagtggtgagggagcctcgccccagcccagagctgggtccactggccagccaggtggaggggttccttcaggctctagtgatgacctggcaggaagctggggacatgctctaggctgttagcctctgtgagaggcaggtggatacttcccccatatccccactcctggttgcagattctgcacttgcggacaggaaccgagtgcccagtacacttctgcagacagctgctctgcattgactcctgcttcctccacttaaaagttgtgggatgttaagcaagttgctataaattctcagacctgtactttcctaatctatcaaatgtgaagaaagcaagccaaggtcacaaaatattagtgagtctacaacaattcacccgcggtgatcagcagcacatacccaaggaggataaaagaaagttgataaaactccccggtgttctgatgtgacgtccccacctcctaggaccaagggtctagcacagagtagaagcttaggatgtatcaaggccccattgagctctgggagttctggctctgcccactttaatgataaatgatcagagtgctgcactaaggcagcttcaccattaagcagccatctgggagggcctggtggttcagctcccaactgcggaagggggcaacctggggaagtgcacagggctctggactagagccagaagactcagctgctaaagcccagcccagccctcctacactttcctacacttcaacccacctgatgcctcctctcttggaggctcgagcccctggtggtgggtgtggggtgggggatctaagggctcaccttgtcactaggcagtccctgtcccaatcacctccatgcctttttgctggggcttgtgggttgacagttgaagtttcaggaccccaggaaaagtgccttaaataacacattcctgcaaacggatagccatttattttcccattgattggagatggttgcggtagcacatcctatgtgggtctggttcctgccgttattctctccctcaccatggtgttccccagaggactccctaacaaaagaaacctcctacgtgtacattttcctctccagtctgtttctaagcccctgtgaggagttcagctaatacaggtgtgcagactgggtgtgcacatctgcctccaaaagtcccaccagggtcttgccatgaagggagccttccctggtaggttaggaaaaccagtaggagagctaaagctccagggtccttgccctcagtgattggtgccctagcggggactgggcactgtccacaaatctatccccaactccttcttggatgcacagctactaaattgtagcctcccctgcagctcagcgggctgtgtctgagctcatggcagtggcaggtgcacatgcctgtcacccagcctagccctgctccttctgtctggctgataagaagctgatctcaaaagaatgctcttgcctggcagagcttcccctgcatattgaggtccctgaatgaccaacggaggcctgcagtgcccctgggggcctggaccctctctgtgccatcccaggggtgagcagtgccctggcttcttgtgagcttccatgtggggctactcgttacctcacctgctctggctcattccagctctacaggggtgcttaacgtgacatccattggactctcagaaatgtgtgttcttatagttctggtctaaaataaggaataaaaattgcccaccgtgttcccttttgtacactttggttttgggcagctctgatgtgagacttgttttctgaaattatgctgcccctcccccgaggagggggcaatggaacagtggcagccaaggagtagaagtagttagttggcacctctcaggcatcaaaagagtgagtaaatactaacacttcaaacagatcctctaggagagcacgctgaaattcaccagagacatgatgggaatcagacagcagaggagagggaagcctgccgagctgggacccccatggagcggaaaggggctccctaacacagggaagaggtgagcaagtgagagaaccctgaaatttcacaactccaccatggaccttcacaatcctagtcacagggagccctctcattgcccccgggcctccagatgaacacagggagcctgctggagactgtgcagaggcactgctcaagcctacatggatcccacaggcttttcatccctgatctgcctggtgcagctgctgctgcctgccatggaggggaactgggcactttcgtgtgccccaaagacagatactgcagctgtggtaaggaggagtgggtagacaaggcttccctctgctgctcctctctgccaaacgggacttgcctgctttggtgacaggctgccagtgccaccgcccacccctgactgagcatgacagccacagctcactgttcccctgagaacccaacccccagaggctgcccattagcccgttccaccacaggcttgcctctgctgccccaggccaggaagggagcaggaaggtcaggcaccttcctgagctcctaacagcaaaatccagctttgggagagaagtgcaagtggaccatgagcccaacaactatcattgctcattgccccagctgaagattcctgccctcctgggtgaacggtgcacagcacagccaccctgctatgcctgaacattgcagctgtggcctggagcccttcggaaagcccagcccccacagtcctgtgatctgttctcaggctccaggggatcagcccacccctccctatcacagccagcacctgaactctgggctgactagatcctggtccagccacatcaggactcctacatgccatctagtgggtcactgagaggtgtgggagttggggaattacctagcccagtccaacatcgctggcacctgactaccctctggacctgagtttgggcccacccaagcagccaacactagccatgactcccacccacatggctgacaggcagagccattctccctctctccatggggtggcggcattaccacattggagaacaggcgagccatacaactgcctgcattgggctgagtgaagaatttccaccctgaagccactcctgcggagaggcacaggacaggcattttccacgtctctcagccacactgtggcctgcagatagaccacagtgtgcatctgaactgagacaccagccccagaacaggggtgtgatagggaagcagattgcattcctgcctatctagacgtggagccagtgcagccccctcatcccaccacagagacctctgtgcatgtcatcaggagctcccccagccacccctatcatggctggtgcctacgcttatcatttggggtatttgtgggaaagccagggttccagctctgcccagctgcaacctctcttccaccctcccaacctactcttagcaggaagctcagggaacctggcattctgctgtccagtccatcagctgaaacaatagagagcacctcagtgagcaaaggtcagatatacacccatgcgcttatgccacagccagtagttagtgagaatctctcaggcatcaaaatagtgagtaaatactaacacttcaaatagatcctttaagagagcatgctgaaattcaccagagacatgacaggaatcacagacagcagaggagagtaaagcctgcacagctgggacccccatggagcgaaaagaggttccctaacacagaagtgccccctactggcctgcaggttgaactgcacagcccaataaaaaacagaagtgcacagggctgcaggagaaaggccataacccctacagtgacaccctcaaggcggggggagggagagataacagagaaaatatcccacataaatgaaaataaatttgaacataagaagtgtcagctcctccagatgagaaggaaccagtgtaaaaattctagcaccatgaaagatctgaatgttgtgacaacatcaaataatcacactagctctccagcaatgagccccaacgaaaatgaaaaccccaaaattacagataaagaattaaatgtatggattgcagggaaggtaaatgagagccaagagaaagttgaaaactaacacaaagaaaccatgaaagcaaaccaggaaatgaaggaagagataaatacctttaaaacaacaacagaacttccggaaataaaaaatacacttaaagaatttcaaaatacagttaaaagctttaatgatccaagcagaagaaaaaattttcagatcttgaagactggtattttgttaacatagtcagacaaaaatatagaaaaatgaattttaaaaaagaacaaataaagatgggattttcaccaaacctataacttatagacattcctgagagaaaataagaaaaagtaagcaaagctggaaaacatatctgggggaataattcaggaaaatttccttaatctttctagagaggtagacttcaaaatataagaaactcagaatacacctataatttacagaatgggagaacatatttgcaaattatgcttccaacaaaggactaatatccagaatatataaggaagtcaaacaactaaacagaaaaaaccaaagaacttcatttaaaactgagcaaaggatatgaacactcatttctcaaaagaagaaatataagcagcaaacacatgaaaaaattctcaacatcaccaattattagaaaaaggcaaattaacaccacactgaaatatcatcttataccagtcagaatggctatttttaaaaagttaaaaaacaacagatgttggtgtggatgtagagaaaatgaaacattcatacactgatggtgggaatgtaaattaattaaatatctatggaaatcagcttggagatttttcaaagaactaaaaatagaactaccatgttactcagtaatccaactactgggtatctatccaaaggaaaagaaatcattatataaaaaaagacatctgtactcgtacatttaactcagcactattcacaatagcaaagtcatggaaccaatctaagtatccatcattggttggccagataaataaaatgtggtatatatacactatggaatattatgcagccataaaaaaggaaattatgttctttgcagcaacatggtggaggtggaggccattatccgaagcgaactaactcagaaacaaaaaatcaaatactgcatgttctcgcttataagtgggaactaaacaatatgtatacatcgacataaggatggaaataaggtgggaaataagagggtgggagggggatgagggctgaaagactgcctattggaaacaattttcagtatctgggtgatggctacgctagaagcccaatctccaccagtacacaatatatccttgaaacaaacatgcacatgtgccccctgaatctaaaatttaaaaaggcagcccacctgcaactcagtccacctgcatgaccaagggttgtgcccccttttctcccttcactagggtgaggagcttctgactgatgccaaaccagggagatcaactcagctggagtggaggaggcagggctggagtggcccacagaagggtggctggcaaagttccctctgcctgctcctactgtcactgttcaacacagaaagcctgggagggtccctgtgggtggccagggtggaggggttctcccctctgatgtcctctaagctcgccttcttaatctatgacttcctcccttgagggatgaggaaggatgacaggccctaacttgagttcacattggctaaactccaaaggctctcaatccccattaacaaacgtatgttgatttcaccaggatcacatacaactcttcatgaaattgcacatgcatttctccttatggggtctcagagccacagagatggaaagcagcatcttcatgtttacacatgggttaacacaggagcacaggccagctgcagagaagtgggcttgaacctcccagggcagaaacatagttgtcattaattagagacaacccaatctgaggaagagataaaatctctctacacttttaggttattttaattccctttctttttcctatctatctatatatctttttatttatttatttatttatttatttatttattttgagataggttctcactctgttgcccagtctggcgtgcagaggctagctgcaacctccacctactgggctcaatcaatcctcccacctcagcctcctgagtagctgggaccagaggcaggccatcatgcctggctaattttcatattttgggtagagacggggttttgctatgttgtccaagttggtcttgaactcctggactcaagcaatctgcctgccttggcctcccaaaggcctcccataagccaccatgcctgacttccctttctgcctaatgaaagcttccccacacttttcctggtgtcataagtataatgaacattttgtccctgagtcttgagagacacacagttccaggcaccttgtaaagttgcgttggctgctctggcacatttgtatgtggctgtaggcattaggcagctgggccaggcagtctagagccagagggtgcactgtctggctgtccatccatttccacacctgcacagacatgtgacccacctctctggaccctgcctatggggccgcacacaggccatgcacctgctggccaggcaccaggcacccttgtcataaatatctccacctgtccagcaatgaggtgggaacactcaattctttgtgaaaatctctgtatttacaataccagaagtgtgtgtattttgtgaaacaaaaactctctaaaaaacaaagcaagacaaaaaattgatgaagccaggcctcccattgcaggaagaatgttgagaagtgaagtgtggaggggtggcatgttctctttagcaccgacggttgctcagggaatgagcctcaaaatggagaaaaaccaaatgactgagtcccatccacccccagggctccagtgctctcctccatttcctcaacattgacctggcttatttctctggacgccttgtgcagggtgttgtgtgcctggaaaagcctctcataaccagcttgggagatagatgtgcagacacagaggggagaggctggggaagggtgggagaggcctgtttcccaacatcgcagctggcaggacccagatgcggagtccaggctgcggcaggacaggcgggtgcaagacggagaagggggacaagaaagagtaactcctcgggatgacggcattgaaggtcaaagtcatgcaacctagagaaagcccccaaagccctacacatataggcaagccattgtgttgaagcctaaaaaaaaaaacgaaacatggagcggggacattgccatccaaattagtcaatactgtttaaaacctaaacctgttatatttttaacttgtacttacctttcaaaaattctacggaaaagcataaatattgcattctagtagatgggggaggtggagagcagttgatttactctcaagatagattaggtatgactggacaacctcagccacagccccccaggtggtcccctcctcatgcgctcaggggccccatgtgaggtgcccttggcctgtgtgggtggcacctcgggctgtcctgtagccactgtctgcacacactggatggtaggatcctgcctgttgacactcatctctgttggggctgtgcttccttctttggggacaaatgactaagaggggaagtttatcttctgtaatgaaatgaggaaaatttgctgaagtttgcttggggggacagtgtggggtatctacaaagagaattcacattttccgaaagacactcattgccttctgggatacattcagaatttgagtagccaaaaaaatggaaagcagggacaagggtgtgaggagtataggaaataaaatacacaagtatttttcattgcaaaaaaagctagggagggtgatacagcattgaattcatatttcaaagactttgggggcttttttttagagaggaatttggcctaagacctcatggtcccaccctttggtgacagatgaagttggggctgttaggagtggaatgaatccatgtctggcatccccatggcaccagggtgctgtgttctggcaggtgcaatataaatccagctcattcagaggacaagctccctggtgacaaactctttggttgatcagcaagaattcaactcctttgaccataaacaaaggctcaatgtatatgtccagttcagcaacaaaggcctgttcatcttgggtgtttggtgccttagaagttgggctctaggggaggcagtgacaaagggggttctgcagtgtgcctgagaagagcagggagcagtggcaacatcctggagggaggcctcgggcacctagtggggaggaggtggcacctgggggagcaggtgatggggaggcactctcagctgggttgaaggcagctctttgcattgcagaatctgtgcttgggaaaagtactcccggctgtgtctcaggcacatccttgggctgcagggagcctgtggtagggaaaggcactcctggctgtgtggaaggcagatccttgggcagcagggaccctgtgtgcattgggactgtgcaagggctaagctgaggtaccttctccatagggaagagaagagagagaaggtcactgtgatggcattggaattgggctcagaaggctgcggttgcctggctcaaggggtggggccaggacccatcgagacccacagtgtgggccttgctgtgctcctcctctctcccctgggtgctgcctccagcctagactcctccttccagacctagctcaagtgtcgaatgtctcccctgcctctccaggcagccctgggtctctgactctggactccctcacttggggttgaacttgtcttcttctccctggtagccaggaggagcccccagttacctctgtaacccagcatggcctggaaggctctagtgagcatatggaagggatgagcactcaccacagccctcaaggctggctccagggacccttgggcgggtgacgagctgagaaggcagcagctccacggttcccttggtttgggaagaggatgatccagacccgtaggaacagctaattctgtcttgcaaaagcagttgctttgctttcatcctgggcacacaccggtgtagccaatccaccacccacacagctgcaagccacacagagattgtctttgtgttcgtctgcgatgccttcctctctgctggcttcttatgctcatgatcggggcaaccctgtctggagacttgatagggcctttcaaaaaggccctcagggtcactctaagtaaggtcaaagagactggggttcattcctgcctctaaccacaggcaagtcaatcagcctcttgggaatggcttttccatctctcaaatgggtccagcaatactaaacacggattggtcaccccaagtccattcttcctgtcttccttactaacgaagcctgcttttgttaagagaggaaacgtactcagctgtaaaatgaccttttcctggtctcccttgctgagcagcatagccatgtgaatgcactctggcaatggagtataaataggaattgttgggcattgctttaaagaaggctgctttccctttttccttcttctttctgcctggagtatgagtgtgatggctggagctccagaagccatcttgtaagcatgaaagcaagttgaaagcctggccttttcaaagagaattgttaggtttccccaaggctgttctcttgggggcttagcaggcagcgaattagataacaatctttctcagagcccctcagctttccatttcttaatttgcctaagctgtcctctgtttctggaatgctcttcctaaccttgtctgcccagtgaactgctgctcaccttttcagactcagctccagagtggcctcctccaggaagccccttatccttgctcccagctaaagtaccacccttcttggtctttctggtcatctcctggctgaaggctgagcctgttgtgggaaatgccatgtccttgtagatgtgcctgtccctgctctgcaagcatgaggactgtaactgcatccccttcagcacctgtggctggagggctgcagcaggctcccagaatgccagtgggcatatgccactttgcctcgacctccccatctgtgatgtggtgctgatgatgcccacagaccacagcagaggcagcagcccatcaatgcttgtggtttccctggcatggggcctgttcagctccttctgtactcaaggccacccttcccaggctgcctggaatcccaggggtctcctgccaggccagtctcagcctgatggtcccaaggaaaccctctattcctcacaggtgttccccagagcatgcagactttgagcttgcttgaacctgtcattcatgcagaaagcctccccttgggcatgtgagtggcaaatgcctcaaatgctggattcccttacggagacggtctctctcttactgagagggacccttctcccctctaggccccgtcctgggatctgccctctcctgcccctgccctgctagtccccatccaggatgatgctgactttccccttgtgccccctcagaccctgtcctgagccacctgtgtctacagctgcctgtccaccctcctccatgcccgattgggctcctgccaccttttcagggattcaggcttccttcttagtacaacccaagtgtgtcagcctgctctccctggctccacccatttagtcctcccaggaccatcttccctcccagctcacaccctccagagaagctctacactgctggcagaatccagtccctccacccagcctgcatgtcagaccgtccctgccaggctcctggggtctccacaccctgccttcaggcaatcagagcccagctacaagaagaactggccatgccctggcaccttccctcgctcctctgccttgagggctctgttcctctgccttaagggctctgctcctcacctctccatgttgcacatccaagcccagccatcatgtgcctcagcctcagctctgatgctgcctctgacaagctgacttccctgaaggggagcaccctggtcccaaagccccagagcactagagctgagcctctttctctttctccagacagcctctctctctccttgcagcacagagttggggactccttcccatcatgaaaccctcaacttccctgccccaggtcacacaccaagttcaaggctgagcacagagcaaaagcaaccagagagtccatgggcttggcccagacctcagcctggaggcacagggacaatttctctccacttctcctttgagcccaagaagtctcagcaccatattccatctgccactgccccctgaccacaggccaactggacccagaacacaggacacttcatcaggatgtctgggccacagtcccggcctcacagaggtggctcgtcaggggggctcaaagccccacctcactcttcctggcaccatccagactataaggcccagacaagatctcacctgctgttcagtgctctcttctgtccacccaggcctcagcttcaaccctcttgcctctgagcaatccctgtgtgcagtgaggccattgtgttcaaaccttcttctggcatggttaggaggcatagtgggaaccagaaaggataatgccactcccagaaggagatgggccctcctcctggcactgccaacccagcctgggggatctgtgctgacattgtgaggggctgcctgtgctagtttttgtgggaggggaggtgccagctatggggttccagggtgccgggggcctgctgactgccgaccactcatttctccctgccgtatatcaattttgacaccagtgctgaagtcctcccagggacattccaacttcagaccctgtactgtcttccttccttctcctaatgtttgtctttctttatttccagagctcctctttctttttctaagctaggcgctttacacacctattcttctttacttctcagagtaaagccctgcagaaacactgagacacaaataatgggtgatcaatgcttttcctgggttgggggctaagatggtcatctttccaggtgtgaggagagagggtgaggcaaggtggggacacagcgggccacctcctctccacaacaggatgagagataaagggtaggttcccctctcagtattctccctgtcaagcactaagaggagtctggcatgcatttgcacaggaggttcttagatgtgctggtgctctcctagtgtcccggacagctgatgagccagaactgtccacatccatcctgatgctggagtgggcaactgccaccaggtgcagaccactggcagacaggcctggattggatctggctatacaggctcaccttgccattcccttagccttgccatagcatagcctagcattctttatgtctccatttcattttatccttatttttgagacaagaaagatgaaagttggagaagctaaaccactctgagccatgttcttctatgattacccttggaaatgccaaaggggtttctcacttctccacagttaggcccaaaacagattcctgttcatacatgtcatatctgaaatgtttccttgtgaagcagaaaaacaaccaaaagtatattcaaaggaccgtgtctcactagaaatactcattcattcattcaacagagagccctgtatctgtgaacccagatgcaagacaacaactacttgtggaaaacatactcctgtcaacactgacctgcagggctggtgcgtgcctgtcttccacaccctgcatccgtgtgacactgactatcatcatgaacagattgacaaggacaatatttgatttcctacctttggttcaccaactccaagctgccccaaaatattcacactggctgtatcttctgcttgaaaggaatcccccagatttttactccactgacttcttatcattttttctcagtttaactgtcactccctccctcttcctctccttttctcccaaaagagtcttctctggccaaccaggcatttgttgacacattaatgactttcaatcctttggacagtatctgtcaccatatgactctccctaagaaaatgtaaacctgccatgaaagtgagacattcttcatctggttcattttgtcatcccagcacctgatgtggaatacatttttgctgaattaatgaatatgaataaatctgtgaatattttcctttgaacatttttccttgtgacaaagctggtcttgaaattaaagaaaaaataaaaaaatttccactgcttttatgcttatctagacctctagaataaggattcatggataatgaaatcaaacttgtatttattctagttattattagtaattatatatgtgtatatatataatctcatatatatttaaattattttgtatatattttagtgtattatgaaatcaggcttttatttgagcttttccccaatagcttgccaaagtttacaaaaacatttgtgttaaatcaaactaaatttgacctaagaaaacctctgtaattgcatacttgagttctcacacatgaactgcaacctaacaaactgaaaccctaaatgagaagtctgcttctgtaacaatagctgagtcttagccaatcacagcagccatgcttcaaccactcataaggagccaattgttcaaaccatgttcaaataaggcaaatgccaaggtgtaactaatccagatgtttgtacttcactttcattttctgtatgtcatttctttttctgaccatacatcatatctgaccatatggtagccacagaccctctctgaatctgttctgattctgatgttgtctgagacacatttttttcttgatcagttaaactctgttacatttaatttgtttaaatttttcttttgacagatttggtgtcagaagataagtaaaactgcaaaaggctggagaggcttcaagatggctgactagaggcatcaagaactcacctcctccacaaagaaaaataaaaatagcaagtaatcacacttcaagaagaacatctaagagtgaacgctggaattcaatagataaatgatgggaaataactgaggcatgaaaatggaagaaagtgaggcagcaagcttggctgggattggctgggaacccagagtggctccctagtgcaagaaaaaggttagtgagagatccacagcggttgacattctgaccatggattttataaccatagccaaaggaaaacccctcaaccctcataggccctgagactagcgtaggaaggtgcctagagaccatgtaacagcactgcttcagagggagctcatgtgggtcccagtccccaggtcttaggcagctgtagctctctgccatttggagagcccagccaccaccagactgcatcctgcactggaaaccaacagcccctgcatttccacatctctagagtcccactgacatctccctgtgttcacctgtagggcttcagtagtgcaatgccagttggacccagcagagcctccctagcactctagcacacacagtgtcctgcatcttggggaatggacagtgcagcacaatagggaggctgcctccccagtgtgctgagaggctgccctcagagaaaaaggagccaaagtgtgggtttcttagagcttgaaaactgtctacctggggcagttatcatggacagcaaccctgttcccaccccagcagtaaggctgccatgcacatgccttgagggcagggtctgctactgctcactgcatctgttgttgctgtcactggggccaaagcacatgccacttgacagtgactttgccctttttgggcagcagagccacgcatacttgcatcccctttactactggttttccctgttgctgctgctaccactgctgctgccacccctcaacagctaggggctgaatctcacacttcccagatcctgagaactcctgcctatggctggagccactgtaagcaacctgcctatggcccagccatttgcacataccctgaggacagtttcccctggcccactgctgccactgccacagccacttgagcactctgccagtgggcctggggacccctccattttgccaaccacagccatcacctgagtgttccattgaggggcctgaggatacacccacccaccttgacactgcttacctcagtgcccaagcacactgcctgggggcctagggattacccccactctgttcaccattgctggcctctatgtactcctcctaggggcctgatgatggacccactcagtctaccactaccaccacagccagcatccatttgcatgtaccactttgggtttagggaactggcctacccagccatcactaacactgatgtgtgttgcttcagagccttagagttgctgtgttgttgctattgtcaacactcactccacacatgctgccaagggaaggacctgcccgctggccaggcctaccactatgactgccagcacccaagccagccacatggaggcctaagaactggcccatttgtacctgctgacactagtgcctgtgtacactgcctggggtcacaaggagaggtacatttaccctgccactgccaccatcagggtttgagggcacacccacctaacatccccaaccgcagcaaaacatcatcatagcctccactaacaaccacagcctaagccactagggaaatcacacaccactgatactgcttagaggtgaagaaatcatagagacactacattacttcatacacttagaagcaaagctaaagtgtcctacccaataaaaaccatggaaatatcttcaggaaaaagccaatccaaaatgtatgaagaagcaactgttacaaaagatgtgcagatatcaatgtaaaacgcaagaaacatgactaaacaaggaaatatgacacttccaaaagattacaataattctttagcaacagatttcactggaaaaaaaatttatgaaacgtgggaaaaataatttttaaaaatgatattataaaagctcagtaagacacaagaggacataaacaatacaaaaagttagaaatcaactgaggatatgaatgaaaaattcaccagagaaacagatataatagaaaaaagaatcaaacagaaattctgaaagtgaagaattcaatgaacaaaataaaaatttattcaagagcttccacagtagagtggagcaaaaagaagaaagcatctcagaacttgaaggcagaccttttgaaataacccagccagagcccccgtccccatgccctactcacacaaaagaataaaaaacaatgaactaaacttacagaacatacgggacactataaagcaaccaaaaacagaaatttggggtgttccaaatggtgaagagacccaaggtatagaaaacctgattaacaaaataatagctgaaaacttcccaaatttagtaagagatttaacattcagatacaagaagtttagaaattcacaggtaattaaaaactcaaaaggtcttttccacagcacattatagtaaactgtcaaaagtcaaacagagaattctaaaaagagtaagagaaaggaaaaagctctggtcacatatataggaagcccgatcagaagaacagttaatttctcagcagtaaccttataggccaggagagaatgggataatacaggagagaatgggataatatatttcccccctaaaaagggggccaaaaaacctgtcagccaataatactatacctaacaacattattctttatctttaaaaaatgtgaaataaagttttttccacacaagcaaaacctgagggaattcatcatcactagaccagccttagaagaaatacttaagggagtcctatgcctggaagtgaatgaatgatagctaccgtcatgaaaacatacaaaagtctaaaacttgctggtagagtaaacacagaaataagaaaaagaactcaaatgttaccactatagaaaaccagcacaccataatgataaactacaagagagaaagaaaggaaaaatatacaaaacaatcagaaaacatttaacaaaatgacagaaataagtcttcatatatcaataataaccttgaatgtaaatggattaaattttccacttaaaagataaaatctggctgaatgaattttgaaaatgccccaactatatgctgcatacaagaaactcacttcacatgtaaacacatgtagactaaaaggaaaggaatgaaaaaagatatatcacacaaatagaaaccaaaagtgagtagaagtagctatacttatatcagataaaacagactttaagacaaaagcattaaaaagtgacaaagaaggtcatattatataatgataaagggatcaattcagcaagaaaatacaacaattctaaagatatatgcacccaacaccagagcccccatatacataatgcaaatattattaaatctaatagacttcaatacagtaatttttggggacttcaacagttcactctcaccattagacatgtcatccacaaagaaaaccaacaaggaaaaaataaatttaacctacagcttagaacaaatggacctaggagacatctacagaatatttcatccaacaactgcagaatacatgttcttctaatcagcaaatagaacattatccaagatagaccatatgtcaggtcacaaaacaaatctcaataaatttttaaaatatcaaaatcataccaaatatcttctcagaccatcatggaataaagctagaaatgaataacaagaggaacttggaaaatgtacaagtacatggaaattaatcaatgtgattctgaacaaccattgtgtcaatgaggaaattaaaaaggaaatcaaaacatttgttgaagcaaatgaaaatggaaacacaacatacccaaacatatggtatacagcaaaagcaatgcctaagagagaagtttgtagcaataaagacctacgtcaaagaagtagaaacaattcaagtaagcaatctaatgacgtacttcaaggaattagaaaagcaagagcaaaccaaacccaaaattagtgtaaggaaagaaacaatgaagatcagatcagagtaaaactaaatgaaattggctaaaaatacaaagaatcaatgaaaagcaaagttggttttttggaaagataaaatggataaactgctagataggctacccaagaaaaaaagagataagacccaaataaacaaaatcagaaatgaaaaaggagacatagtaactaatactacagaaatacaaaacacatcaaaaactattgtgaacaactatttaccaaaaaactggaaaacctatagaaaatggataaattcctggacacttacaacctaccaagattgaaactagaagaatcagaaaacgcgaacagaccaataatgagtacaagattgaatcagtaatgtgaaaatttaccaacaaagaaaagcccaggactgtatggcttcactgccaaattctaccaaacttatgaagaagaactaatgtaaattctcctcaagttattctaaaaaatagaagaggcctcattctatgaggccagcattattctgataccaaaaccaaacaagaacgcaccaaaaaaggaaaactacaagccaataaccctgatgaacatagacacaaaatatcctcaacaaaatactagcaaattgagtgaaacagcacatcaaaaagataatcccgccatgatcaagtgggatttactctggggatgcaaggatgatttaacgtacacaaatcaataaacatgatatatcacatcaacagaatgaaggacaaaaaccatatgatcatctcaacagatgcagaaaaagtatttgataaaataaaaaaaagctttttgacaaaaactcttgacaaattaggcataataacggcctcatatgacaaactcacagctaacatcatatgaaatggggaaaagctgaaagctttccctctaagaagtggaacaaggcagggatgcccactttcaccactcctattcaaaatagtactggatatcttagccagagcaatcaggcaagtgaaagaaataaaaggcatccaaactggaagagaggaagtcaaattttccctcttggcaaatgacatgattttatacttagaaaaacctaaagactccaccaaaaaacttctagatctgacaaacaaattcagtaaagttgcaggatacaaaatcaacatagagtctgggtgcagtggctcacatatgtaatcccagcattttggtggaaggattgcttgagcccaggatttcgagaccagcctggacaacatagtgagatgctcatctttattataatttaaaaaaattgttaaatcaacatacaaaattcagtagcaccaataataacagctggaaaagaaatcaaaaaggcaatcccattaacaataactacaaaagaaatacctagaaataaatttatccaaggaggtgaaagatctcaacaaggaaaactataaaacactgatgaaagaaattgaagaggacacaaacaaatggaaagacatcccatttacacaaactggttgagttaatattgctaaagtgattgtactacccaaagccatctgcagattcgatgcaattactaaaaaaaataccaatgccatttttcacacaccaactccacacagacagtgacctcagccgggaatggatttttttctgatcagcatcgtcatttctcactcagtgttcagatgacgttgaatgaaatgacgttattcaaggacctgctgtgtgacattttgcactgtagagagatgcacttgcaggtgtttccatagatcactctgacagcaggatatggggcggaacctgactcagacatgagcctcccctcaggtcagttcatagcccggctctaccactcaacaaccctgccacgttgagcctatcactaaacatcagagcctcggtgtccacagctgcgaaatgtagacagtagtgactaccttgcaggacagagaggtggccatgcacacagtaaggacctggagccaggctgttggatgctggtcctattgcttcctggctgtgtgaccctgggtaggttacctaactttctagggcctctagcttcctccccacaatagagttatggcatatattagtttgtggaatgtagttgcaacagtgtctggcccaccttaagatctatatgaatggcagctatgagccttcctgggtgttgtgagaatgaaatgagatccagtttctaaagggcctcctgctgtggtgcgcacacgaattaaactcactggaaaggctgttatatcattgtgggcactatatttggtgacagagagtaaggtttcacactattagcctgactttcctgatggatcgagtaatattgtttcccattaacataatgagcatccacaggataaggtgaaggagaatcctcagcatggatgggaggtagagtctggctcaagagcctctgaatcttgctgcttcattttgtatgagtgtgtagtggggatggcctggaagaggacactatcaaaaaatttattcagggaactgaaggtgatggagcagggagacacactcaatttaaaacaaaaaaaaattgaaattaaacaagactgactgcttttgccacaaaaatgctgaggtttttggtaaactgagccttggagaatttcctgcattattatgtgctgaaatgcaaaatgtttggatttgctgaaacaataaactaaacaaggttttaaaaggcagcagctcctctaaattcgacagcacactccagtcgaagaggctcaacttcccgagcttatcacacccccaggtcagcccacaatgccaagtcaggaagaggagtttggaaatagcctcctcacaaggccgggcatggatggagaaagaggcatgcactggttctgtcaggatcccccaacctgctgagggcctgagtgaatccctgtctgaggggagatcctggaagaggggtgtgcagcacacaggtggcctcttcactctgcagtgaagagacagacagcctatgcctgtcctggcaggacgtctcactgatgcctccacagccctgcagttgcagttgggctgcctggctggggccgagccacccatccaagcctggtctccagcgggttctcactgagatgcactctctctcctccagcctcagggctccttctcactcagggaacccctggctcaggcaggaaggtcacattcccagtgtctccaagcagaaagctgctgagctcaccagcagcctggctggtgtctggctctgtacactcatgactaggcttacagtctgaccctgtggctctgaaatgggctgaaggtctcagggggacgcgtcctctttagtgtatgattcacgttagaccctggggccagcacaccaaaggcttaaagaggagaacaggaattcctgtcagcctgtctgaattcttgggtacccgacagaaatcctacaagacactcagtcgggtgttcacgactacagttgggaaggacaaggtcaaattagattgtggcagaggagctagaagggagcccaggtctacaagccacagctatgggcctccctgggttagggacagatctggggttgatttctgatagccctggagacagccacttgtggccttgggcaactttctgggccactctgggcctctattttgccattagtaaaatacagattgtctctcctgctggagaatttcagggtgaacttcacacagtgacagcggaaagggcctggcagagccctgggcagtgtaattgccctccttaatacaattactctgccaccctcccccaaactttagctgcttttgggaatgggacaatttcagagacttgctccatcccctatctcaccacactgggcagtaaggccatttctggccctttcccatgcccaccctcccgtctcttgccttccctctgcttgaggtgcccgttttcacaccccacagtcgagctctgtcccttctgactgagcctctcgctgttcagtgcataaatctggactaggctgtggactggaactgggctgtggcaacgtggagaggccttatgggacctcagatggaaagtgggcttctgtgcaagcgtggctgggattgagagccctgtgcagaggcacagagccaggaacccagcagctggagcagccctgcctgcctctgacaccagcaatgccctgccaggtgtcagcacgcctcccagggcctcccggcccgtttcttatcagcagcgtccagaggcttgcagcctgcaaggccttctcagtgcgcagccacctggccactgagagcgtatgctgacctgatgcaggaggtctggccagtgcaggtccctctataaaccctggggatgagatcatcttccaggtgtaaaaggctggactgtgggaggcacagggagatgagccccaggcccagccagtagcagggctctccagggacccagggcctgagcagagaagccccttggtgctgatccgaaaggagagcagtgcagagtaagggcaggagccaggcccagggcacatccagccctatcactcgcgggctttaggagcaaggacatgccacttaatatctcagcgcttcaggccccttcagtaaactggataataatagcacgtaggtacagttactgggaggatgaaaacagtgaaagcatggcctaggctagcaactggcccacagaggactctgtatattactgaggcctcgttagtaattattagtcctcattcataataagttacaaagagaaaatcttaacaatttcgtcctccccatggtcccaaggcaatgatacaggaaggaatccttattccctgttagaaccaatgttgccccgacaacgctgtcagccatcccaaccagcacttctgaccccaggggaccagcaaaggaagcacatagtcccaagtccagaaacgggctgggaggcccatgggcaccgtttctgtgtgtcttgtgccgtcctctttggcagacgcctgacatggctctctgagccacaatcccagaggacagcagtcagggaaaaagcagtggccttctgtccatcaagtgtgtccctgtgccccagctcacctggcccctgtgctgacaccacatccatggcacctggcagcagcttgggtgagagaggtcacggaagatatccagattgccctgaaaagcaacgtggccatgatgaagccatgcagcctggatgccttctcaggaccccccggcccgccatggctctatcccaaggaacacacgcagacaaagctcccatttccccctgggggaggggcctggcagggttgcatgttggagacatggtcactgtggccacagagagttttggaatctggacaaaaaagtattttggttgtaggaagaagaaaagccaggggcagattcatacaaaaagtccaaaggcgggaggagcctgtggttccaagcagaggtcctgaaggggagcatgagttaggcctgggggcccagcatgggggcctgggcagggagaaggagccttgctgctggggcacacaaggggaaggcaggtgagaggaccatgccctgctcagggagtaggtacctgacaccagggaagagagaagaggaaggcagagaaaaacaggccagaaagcagcccaggacccacggcgggcagccccttggccactcggcgctgcagtcaggcctttctgggctccggtggggatgggatgagggccgtgtgttgcaaggcagtgcaggccgctggcaggtgacttcctccccctggagacatgtgccccacactctgaggagagacaggcctggcttccccagatgcccactgaggctgcagaggagcctgaccctcccaggaggaagcaagagatccgaccacagacagagccaggaccaagggggagaggggcagagccaggtaggaactctggggtccttctccctcaacatcagccacccaggcgccctctctacccctgtgcagggccccctgctgctgcctggctgggttcccctcagcaagatgggccctggacccgcccatgaaggaggtttcctcagggagagtggctgttgtgttggctccggggctcaagctcctgcacaggtgtcttgtgagggcgctttcaggcctccacctcctcccctccctgcagcacctgtcagcccattacagcaggcgacaagcccactcagtgacagcttttcctcactgcctgaagatcctgctgcccgggctggcaggtgcccctggcatccttgcagtgttcgtggtggtgagaacgtgtgtcaggactggtcatttctatttttttttctttctgatctgcatgaccttttgtgactcaggttgcctgacccatgcacctgcaggcaggtggtctaaagcccagggccattgccagagctgaggcacccctgtggaaaccagggactggtcagacatcagaagctgccactgtacagaaacatggatccttctagagagggagttcaatgtgtggggacagacctggtggtgcagaggacaggagccctcatatatgcctgccactggggcacgaggctgaggtggccatctggttgctcttggcatcacgtgtctaaagtccagcccctgtagagcctgccttcctccagggcccaggtctccacagtgggacccatctgccccctcctcccacagttccaggctgggggtcgcagcccctctccactgtgcttctcacctctatccttctcatccagaacactccttgacacctacagcaacaaacaatcacagtggggcaggtgtttacaggagccgggggcagaggcagtggaggcagagtttgtggtggtggagatgatggtatctcctgctctagctcctaaaaaacaatggtctgctgacttttcagacaactcttaagagcaagggtatggtgtcattgcctcagccagcaccgggcacagtgccggccactcccagatgtgtgtctggggaatgaaaggaccagtaagaagcccacaccacaggggaccatccttcacgtgagaaaaaagcaaactcctcctggtttgcagacatggctcttcccctaaatgctaacaacttcatcccggtcgccttggttctcccaaggccagccttgttggaggaggcctgccctgggagctgtgcaatggtcccagcatttgcaggtgactgtccgcatccacctggttgcagatgcagcctccctgggcccactctgcagcacctcagaggccacccttggccagggaggcctgttcccaccccatcccaggctcagggcctcctacctcagctactcaccactgcctatggcccctggtgtgggtccccagcccaggtgagccacagcctgctccccgactcctggcccctgtgttcactgggctggtgtccctcccagctgggtgctcgccaggcctccttcacccctcagccctgcagtccctagaagctaaccccagccagacccttgtccctgccaggaaacagggatccagagaggccaaatggagccacacctgcatccggagcctggggatggggctaagctctgtcctctccaccctctgctctgtcctctgtctgcagctctccgggctggcttcttccaccccagcttccagcacccctgacactctccccgccccagcctccatctctgcttttggctcctgctctgccttacagggggcccttcccacttctgtggggtggacatttcagcctcagccacaacaagccaggactgtgagctgcctgtggggagcttcatttctgtccctcaccagcccagcatggggcccaggggaagctggagctcagtaaagacagatgaaggaatggggaaggcaccagacatgtgctgagatccatgctggttcctcaaggcacagacagctgggggttacagcactgtcctccatttgggccctcaggacctcatgggggcccctctcttcctccctccacacaaaggctgcctcctggcccttgtccatctgtggcttccagaagtccggattgttgaggcagccctggtttcaggggttctggggtcacttctctctaggagccagggcaggcttcagccccatgtccaggacatcccaggccagctctctgtggccagcccggggcaggaggccctgcagaagcccaggtttgctaggctctgggaatgtgtggacaggtctgcgactccccgggctcatgtgatgagctgggagctgagggaaacttcccacaggcgggatcatggggcagtcacatgttagagtccctcagagggtgggcctgtgcctgggccccagagctgggtgggcaaaaatcacttgccttcttgcggcacagccaccaaacacaacacagcagcagtggcgcaagcagcaggggcggcacaaaatagagccagttgcaaaaaatgccctggctgagaaagacagcaatatgaaccacgcctaagggacagaggaatgccaggcctgggagggcctgggtagcctcatcctggtgcccaccacttggaggcccatctgcccattctcccttctctacaggtggtcccacctcaaggcacaacagtggggccgggggtaagggatgcttccaagggaactacaaacccctcctctggccccgctgaaagtctctgcccaagagccctgccaagaaagtcccggaagcttccactgtctgacaaacccaccctcactgcacacctcgcctgcagcacagggcttctgtgaggaccacaaaatctccaggtacaatgatgggcaagggtgggggtgctgcagccaagagaggtgcaggcgcaggagcaaggacaggagacccgggtccatccccacagcctctatccccaattccaggctctgcaccgtgggcacatccacacagagctctgagcctcagcctccacacctctgcaaagagaacgggcctccctccctgggggcacttgtgaggtttagagagctcagagaaagacctggctcagaaccagggccacatggggtgtaagcaaccagaactcttctctgggtgttcttcacagtaaagggaacgtgggcagcatccgtgggaatacaggctgcccaggccttccccaaatccagagttctgtttagagagaaagatggggaaggcaggggagggcagggaggggaggggaggggaagggaaggcaggagaggggaagggaagggaggggaggggaggggagaagaaaggaggggagaggaggggagggggcctgtgctgagaacctggctggctgaaggagaggaaccaccgaggctgagcatgaaggccgccggtgaggctggagccccagggctgctcctgatgtgcctgtcactgtggagccgttagtgggtggattcctgatggggaatgtgtgcgttcagcctgctaatccatgcgtggatatgcagggacaggcaggggtagacccagagggaggactgtcaacactggtgcgtcctcacaaataagactggacacaaggtggtggagtgggctcaggcctcccgcctgtccctccagcacatcctcctccctatgcggccctgggccacgctgcccaaagatgtggagctctgaaaagcaggcactgggggcacagcacttccattctcaggggcctctcggagctgagcccgggtcccagtgcccagagcctccccttcagcagcaggaggggacgaaatgcaggacctggtgagggagcagggagggacatctcaggggcccgagcaaggaggagaggcagaaaggaggttcaaggcatctgggcaatgacagcaggttacaaccaggcaggctcaggggccagggtcatgagcaggttcaggaccagatcagcagctggggcaccagttcagtggcacacgcaccctgatggcagtgtgtggaatcctccagagctcctgggcctgggaggtccacgtggagaaggtggacacccaagaggtactggactctaagctcctggcagacagcctcccagcttcaaccacctgtgccagctggaagccgggttggagcagcctcaggtgcctgctgcacacgctactttctgggactgcctggaaactgtctgccctttctgtgctccccagggtgtatctccttctagtgcagggactctggacagtcctcatacgtgtttgcagccccatgctggtactcacacatgtggtgctggtgatgctgacattgctcttgaatgttttgccgttgttcaagctgacttcaatgaagtactccctaaagcacagaaaacacagacggtgagagccagcccagagagatgcagttcttgaccttggccagtggacagcgtgggtaatgagaggtcattccccaaacgcttgcaggtaaactcagcaatgatgaccaaagggtaagtgggtcaggcagcgaggggccctgcatggggtctcatgccattgtgaccgtgtcctaaatgaccagggaccactgcttggtgtcaccatcccagctgttctgtatttacagagtctgttggcttaactctgagaagcaacctggagcaaaggtaccattcctcaggcaatcatctcctgcatcctgtcctcctcacagaccctaggatgctgcagatccctgaataccttgggggcggccaccaacaatagaaggtggagagggtgcccttaacccagtggcagacacgtgccgccccagcagtgggggtggcatccacattctgtacagctcacagtgcccaaccctgaccccctggcctcctaacctatagggcctcctgccaggtttttctatctttggtccagggcaagttttggaagtcttgtccatactgattggatgttcatctaaaaggaaatgacatgggaagaatgtcgatgcacttgtctgaccagtgtctctccccatgtctgtcctcagcatgcagagctgaccctgaggcccaggaccagcatctgggctctgccttcctcttacagagacccctgtgagcacccaccatacccaggccctgtgcaatgctctgctgtgtaacaggaacaggcaggcagagtccctgctctcaagggactcacatttagagattgcatgggacacagaaaacaaaattaaaaaacaaacaaaaaaaaaaccaggacagaacagatgacagagagtgcaacgtgctgtgatgtccatgaccagaggaggtgaggggaccagaggggcagggacagccacttcattatgtgtgacttctcctatcttgtagagccacaatttctggtctagaggaacatgaaataatgcaaggccagggatttgcttcaaaatactctgtggtaagggttccaaggaaagcagatgggggcaggttgagaattattgaaagtaggtttatggcacaattcttgttattttgtatactgttgaaaacttccatgaataataaattctctctgaaaaggtgacatttcagctgaaattaaaaagatgaggagccagccaggcaaagatcatgtgccaatgccctgggcagtgactcgctgaccttgtcaaggagggaaagaggtgatccagaacagggggcagggcctcgtgggccctggaaaggggttggggttttatttcttgtgcagtgaatctgtccaggttgggcagatccaggatgtattttgcacatggaggcaacaggacttgctggtgggatggatgtgaggaagaagctcagaggagtcaaagatgacatttgagtgtttgaccagaataaccgggtggacagtgacaccatttaccaaaagggggaagcctgaggaggtaactgggtttgtttgttttaagtctgtaattttgtttcccaatttttatttctttatatatttatttatttattttttgtgggagtgtggtgggctcaggagagttctgtaacatgtagacatagaaccttctcatcctgagcccacatccttttcatgcctcctgaagtgttggggagggcacgggccctgctgcatctgcctgctggcctggctccagctctctacccactgggcttggctgccaggaccccggcttcccagggccagcaactgcctggccaacctaggactgccagaacccgtggtatcgacgttttcgccaaggatgatttcaaaacaattatggcatcttcctcattttcctttgaaaacctttctctgcttttttttcacctccctaaatatgcacatagtttactctggcatgtgttttccatgccttattcctgaataaatagcacttcagtctctgtttgttattttggttgataaaaatcgtatccaggcacttcccagaagccagaactaggctctgcccctgcttccccatagggacatatgcaggacagagggaagtctctccctgacctgcacctccggtctggcatcagccaccagggaaggcacgctgccatctagtggggggtgcaggggagacgtgttcagtggtggccaacactccagggacatgttccggggatatcttcctaatagtgaaaataggtttaaaggttgttctcaattattttaaaaaataagcttccttttactcctggataagccatcaaccaggagcagaatggccatctacgcaggtgctcacagctgtggcatgggctccccactgtgagacgtcggtgctggcctgtgtatggagaggtagatggtaacctccagggtgggaagccagtacacccacaggcccacagaggaagcagctgaatgcccttcacggaggtaggctgggtaccccctttcccaggagctgccaccacagggaggcagaaggccctggtagggcaggaagattgcctgggtctgctttcctgccctgcaacatgaactgtatggccctgggcaggctcttccatcatgcttctctctagttctccatccatacgggaaagttgtcagaactaaaatggagtcatttgtgttaaaaaaataaaataaagtccatgacagttagggctaagaaaggctacaaagagagggttttatgcctatatgcctgataacaaaaatatcacaaaagactttgcaaaaaccacaaccttgcacaaaagccattgcagacttaacacaaaaaaatacttctacaggaacatgtgcccaagaactgcctgtccagccttggactagtgtcacccttgtaactgatctttttaggcaagagtaatggtctcaaaacaattccctaatcttcatttctcctttaaaagcctttgtcttctttacctccctgattatgcacattactatggcacacatattcccagtgccgggcaccgttcctgaataaatactgttttcttttagagagaaactctctgtcgttcaggttgacataaatggtgtccagaagtaggacctggagtaggaccactacttgaagaaatcagccactcttggaattggtgtgcagtcctcacttgagcccttggagctccctgtttctgtgacttgctttctctgccctggagagtcttctctcaggctgagcctcctacttttgggtggaagctcttgacttcattcagcatctgatttggataaggccaccgtaagccaaagagcttacatccctcctgaaatgataacaattttttgtcttttccagtaattctttctggtataatgacaaatgtttttctgatttgagcaccctagtttctacataatttacatttgtttgtgaggcatgtcttttctggcaaattcacttttagttctgcatgcctaattaaatatttgtttgatctgtatacccgggttaaaatatctgtgaacaatgacattggtttggttccatgtgtctgtaagtcatatggaaccaaaaaagcccacacagccaaagcaagactaagcaaaaagaacaaatctggaggcatcacattacccaacttcaaactattcacatggctatagtcaccaaaatagcatggtactgttataaaaacaggcacatagaccaatggaacagaatagagaatccagaaataaacacaaatacttacagccaactgatctttgacaaagcaaacgaaagcataaagtggagaaaggacaccctattcaacaaatggtgctgggataattggcaagccaccatgtagaagaataaaactggttcctcatctctcaacttatacaaaaatcaattcaagatgaatcaaagacttaaatctaagacctgagactataaaaattctagaagataacatcagaaaaactcttctagacactggcttaggcagacacttcatgaccaagaacccaaaagcaaatgcaacaaaaacaaaaatatttgtgggggggtaaattgatgaaaaaaattttgcatgtaattgacttggtaataatcagaataaaattatttataagtcttcataaagattgagctctgatattaaaaatacagtaatactaaactaaaaaattggtctcctatattagaacaccaaagttttcttgaaatattgatttgctattagtaaaattgcaagaggttttgatttttaattctgactgctgttttctttaacagccatcttctaaactgcaggcagtttctattcctggcacattttttcctgagatccatttaatttccccagtttcagataaggaatgcaatctttttcatgaagaatggtaattttattcattaaggtataaaatttatttatttattaaatagaaagtaattttatttatcataaggtaaataaataaatggtatttatttaataaggtatttattttcctcaggttcttatttcagaagttcaatttctgctgcatcccactgcacatggtctgcaggccatacaccatagcctgtagcgctcctactcccttcctccgaaaagttacagctttttggttggctgaggtgataactctcttctccaactttttcatcagctgctccaacttttttcctccagttctaacttggcttttatggcctggcactataatgtttatcttgaaggccaagaaaagcaatgttttccgccaatataactagattatgtactcttggcttttcttgatatgtctgaattgttccatgttaccaagaaacttcacgtggttttactttatctaagagctctacattcctctgctcaaggtactagtcttcttgtttatactctcctataatatgagtgtacattcataacacttggatatgttcttttatctctaattgaatttaaggaccctttcatcaggttcaattccaagactgaacaggcttcccatgagaagaagcaattacattgcaggagattttttttaccttttggtaactgacctaaaagacaaacaatttatatatttatattttaccaagataattttctgtgttgtctttatcaaatttttgattacttaagaaaactgagctttgaacaggttaaggttttaaaatatttgtaactttctgtattgcttttgaagtttcctgataatcactcgagttaaatgaatggctattatttaacagtgacctgtgattctattttgatctatggctttgaatctcttgatatttttggtgggcttctcctggatcaaaattctaaattaagtccttttgaactacaattaattttgagattttccagttgggcccttggagaatatgcaagaagatatattttaatttatagaggtattaaatgattaggcttatttggtaaattatatgacaagcattgtcaaatgagaagtgaggctacatcttcttttagtcacatttatgggtaggttattgataggaatgttctaaaaattatatgacaaaatctaatatattataagtcataattttggttgttatgttaaaacttctttaaagttgtatttatttggctgtgttattgatgtgagtattctaaagattataggaaatttataagtctgatacttgtgatatgatgctgtcagtcatgattatggttaatatcttaaattcctgcaggtaatggaaacaactaaattttcttgtcgattgtgaacttttatcagatttttaaccatggctattctaagttttttggattctactcaaaaagcatttgtagtcagttgttgtccaagttcttgttatctgtctatagagtagaccacatcccgaattcttctatgttccaccaatccagccttcttccatggaattactataaatggaaaactgttctgttccaaaagccctataagctgaaactagatgaattttaagaaagcagccttgtgcctgatgtatgggccacataaaaagtttacagtggctcacgcctgtaatcccagcactttgggaggccaaggcgggtgaatcacgaggtcaggagatcgaaaccatcctggctaacatggtgaaaccctgtctctactaaaaaatacaaaaaaaattagccaggtgtggtggcacgcacctgtagtcccagctactcaggaggctgaggcaggagaatggcgtgaacctggtcgtgccactgcactccagcctgggcgacagagctagactctgtctcaaaaaaataaaataaaataaaataaaaaataaagtttaccaaaccatttgatgccatgaccagagacaaactgcaaatcaggatgagaagttgacctttgcacactatagacagcttttttcaagacattggaaaagactccatagtataatgagactcctacactccttaaggttacctttctaacttggcaagataatggagtaattgaaatttcacaattactaccttctgcttgtaagttgacagaatctgacctaagagatcctttggtatacattgactaaataagaaaatgtctgtactattgctaatactgcatgccatccctggataaattcctcttggaaagtcaataccaatatacacaaagtaagaaaacaggccacatggttaaaacagatctcacctaattccttatgatcatttgatttattcagtgggttactgatgtggtttggctgtgtccctacccaaatctcatcttgaattgtagctcccataattcccacttgttataggagagatccggtgggggataattgaatcatgggggcggattcctccatgctgctctggtggtagtgaataagtcttaggagatctgatggttttatatggggtttctcctttggcttggctctcattctctcttgcctaccaccatgtaagatgtctcttgctcttccagcatgattgtgagtcctccccggccaagcggaactatgagtcaattaaacctccttcctttgtaacttacccagtctcaagtacgtctttattagcagcatgagaacaaactaatacagttgcctttaagcctaggttcatggataaaaactattatgcaaattgtattttccatttttaaactttttatatgttacttgttaaatttttgcagaagtacaacttgtaaccataatgctagcccatcactttgagataacagcaagactatggaactcacaaaattgaacttaataatggactcaagatagacttagcccgagagtcactcctttcaaacatcctttaaaggtcaactgtgactaaaagggattgacacttactccaagttgccaattgctccctccaaaatggaccaagacctgcaaccaggacaggcccatcccattatccagggacagtcaaaacctaattacagaatgattgattagtgaggtgtttgcagaaagatcttgatcaaaagggagaaattgtgaaagttctcagaatcaaaatggagttaacatgttaaaaaaacaacaaaaaaatcctggcaagctgaattggggaagtttatgaagagaagattcacatgcttgtatacctgataacaaaaactatcacaaatctctaccaaactacaacctttgcaaagaccattgcaaccttactcaaaaatacttctgcaaggacatctgacccgcaattgcccatgcaacctcacattggggtcacctctattattattgatcttagtagccaagaagaactaactcaaacaattatgtaatccttctcacatctcctgtaaaatctaaccttcctgaatatgcatgtagtttactatggcatgcgtattcccactgtgatgccctattctcagatgaacatcattttcttgtaaagagcccttgtctgtttgttatttaggttgacacatacaaaagaatttctgtaagtcggctttgaggattcagggagatagtgtgcataaggcacttggcacaaaatctgatttaagtgctcaataagcattagctttccttagaaaggggctgctcagtccctaagacactcccgagaaggtataacccaatgaaaaccaaattccctgagaccatccacacaatgctgatgagtgggaatgtggggatgacaggctcagccccttcctatgtacccacagaaaggaggaaaatggccaagaagcctcttggaggaagagaagtcatcctgggattaccatatggccctggaattagatttcagtgaacatactatcatcagatcaaatgaatgtatcaaggggccacctgggaagatcaaggaggatccaaaaatccaactgcaccccaggccctcagtggggaagagcacaccctacccccagcacccagggcacagtgtctgcctggactatgcgcttcctcaggccattccaccatcacagaggtctcctgatgcctaattattgccaaataataggggactttcaaacaaatgctatagcctttccatgaaccaactgctctacacatgtgattttgcttagttaggtacaactgtggctgaccatctataatatgaaaatccacacccaaaatgcttcaaaatctgacacttcttgagcaccaacatgatgtttgaaagaaatgctcattagagaatttcagatttcaaattttaggattagggatgctgaaacataagcataatgcacacattccaaaacctgaaaaaaatctaaaaactaaaatatttgtggtcccaagcatttcagttacagaatacacaaccagcaccatattagctccatgttaaattgagaaaatagaggctcagagtagaacactcatctggtcaaggtgacacaggcaatgtgtgcctgagccaggattccagggcccaggcctacaggctggcatcctccctcagtgcaaggtaaacatacccctctgggcaagctactggtgcacctggccagccagactcagacctccggggttgccaacatttcccaggagcagccttgtgggctttgggtcctgggctctcaagggaaggggaaactgaggctaaggtgggcagatgcagctgtgatcacagacccagtcctaaacccagcctcactgagggggaagccctcgtctaagatgctcttgaggcacaggtggattttttacttccccacttggcagatgaagggaggggtggccggccttcccagtgcctccttccacttgtcttcatggcctctaaccccacagggtccacagggaatggttggcaagggctgggaggcttggctggctgtgggaaaaggcagcattgtgtgggaaatacgtgactcagaggcaccgaggagacaacttaccaatgatagtgctttcactgaagataaatctgcaaataacttcatcccgtttctttagattctgaaagccatttccatgaataaccacatggtaggattctgcaaggacagcattcaaaaggttgaatgtggaagagtggagggctgcctctcctctgacctccctgttcctggagatcctcccccaaaactcaacttgcagatactcctgtaaggaaggagcagtgtctgaccaacatctatgtgtccactgggtcaaatcttcatctggtgtcactgagggtccagggggaggcagctgggccttgagcacactcaaggaccctctccctaccatccctgaaccaacacgctcaggaaaggccttggtccttgcacagggcaggctcagagtactattcctgccctgaaatctgtggtgctccctcaggccccaggggtacaggcggtgcactcagccaggccctccctgatgtaaggtgtaagtggagccacaaggctgcctgaagacaccatgtctcatgcctcagctgggcacccaggccttgatgcctccttcagggctgctgaacactcggggtctctcctccctgtctttctgtgtgcctgtggcaggcaggacacccacaggggcaggggcagggccaggactcgggtaggacaggtgaggcacctacgaccctgctcagggcaatccatcacagaagtcctgttttagctgcgattccagagacctacaggtaactcctcatctcctgctcttcctgatccagcaaggaccacagggcacccaccctgaggctcagggagtgtgtccttccaccactgtggctcctgccctgagacaaacaccacaggggacacagggcaggtggggctggcctcaggagtcagcagaccgcaggtctgcagctgccaagggcattggcctccacccctgcctcctggcccaggccccacgcattccaatccctgctgatgcctggggtgcccccagtccatgcacccgaggaaagcttcctctgaaccctgcttcctgctttcctgcagcgtcacaccttcaaggcaggctgtcggtgaagctggcctgctgacatactttctgaggctttcaagtattttcaaaaatgggggctcacagttgaaagcctgaacatttcccctaaatatccagatttctagctttcttaggaaatgggaaatgcaggcctcagtgggtttgtgtttctccgtgtcagctcctggctgggacctagggaaccatgctcctcagatgaggagctcccaggcctgcctcacttcaaggccccacacactgactgctgacatcagccggctgggcctggcctgctcctcctgctcaaggtgccagcccagcccttgtgggcacccacttgatggatactatgctgtcctcagaaaaccctgggcctggtgggggcactgaggctgtgagagagcaggaaaggccagcttggtgccctgtgctgagcaaccagacctggccccactcagggtaagcattgggtgctctcctaccgctaaggcagacaacagctgcttccaaatctgatgctatcaggcagcattctcaacatcttccttgctcaggtgtccaaagggccctggccagtcggacctgagctcagtgtgcccgggagggagcaactgggcctgtggcctgcgccccttggtcagcccaactcggccaccctgagcaggactgagggctgccccaaagcttcacgatcagggtggttgcaaattacattctaagctgtgttaggactacatattctatgtattgcaaacattgttttttttttttgcaaggtggatggatgaaaagagagggagaaggacagacaaaggagcatgggcaaacattcattgtaaaatcccagtggtggatagaggtgtgtttgtgttcattgcacaatcctttccactcacctataggtttgaaaatttcaacaataaaggttggaagaaaaccaaagaactaaagaagaaaattatacttggacatagacaaccggaaatcatgatacaccctgggtgacaagtgactgatgagagggacagaccaagcccttggttgcagggagtcagaggggctggtcatcaggaaaggcttccaggatgaggtgccctatgaacagggctgtgaaggacaggtgggctcggcccttcgaggtgaggcaaggcttgcagagtgcctgtgctccacctggtcccacctctgcacaaggtgcccagaacagggagcggcccctggagggcctgggggttctgctaagagcctcagacacctgccaggctggagagggagatgcctgtcaaaaccctccagccatgtgtgggggatgggctcaggatgggcctggagcagtgaggccaccagaggcctctcccaggctggataggaggcccaggcctgaatgagggagtctgggctgtgtgcctccctccctggcctccttcctgggctccctggagccctcctggtttcttggtgacagcctgctgagagggctcattctgttgcatttgagttccaggctcctgccttggcctttccctcctgtgactgtcaccctccatgtggggcagctttgcacaactcagccaacagctgacaggtcagggctgtgactgcgggccacatgggcagaggcagagggccaagctggtgggcagaggcagagggccgagctggtgggcagagggcacctgtcacctcgactcagctgcctccagggaggagttacaactcacatccccacctggggttgacaggttgacagggctgctcagacgccacagcctgtgcatctccaggggacatcatcagagcacagctgtcacactggctgcatggctgagcagctttaaatcaggagcagcagaaagagaccctgagggggaggggagctctctactctatccccaccctcagctctgcatcggggagaggcggtgtcggggacagagcccaggaccaatcgtagaagtgtcagcacagctcctgttcctgggtcctaccagctcccagccctgtgccagtccctgcacagcccagtgcctagggactcacgacaggcctgacagcgtcctttctgttcatgggaggcacctctggagctcgctgacattggactatttgctctggtcgtgtgcccatggagagcagagctcagacatggaccgtgtgtcggtccccacagcctactgacagggcaccctgcagtgaggaactgggaagccagagcccagctgctgctctggggccagcggcacccagcctcgtgctgtccccatggaagagagtcacccaaggctctcttcctctccagcagcggtagttgcgtaaatgccggccatgcggagtcccagcgtgtgcaggcggaggtcaggacagacgggtcatcacagaggaccacacaatgtcaccacccatgccgggaccccagatggcaagaagtcacccttgccacattccagacagtagggacagatgctgggactgatcctgtgggattgaggtgagctgagggtgtttgtgcggatgcctttgttgggctatggaggtttccttctgctcacagggtgctgtgggatgttgacgcccccacttcttgttcttcatcccctgagataaccgcttggtccctgtttcccgttttgttgatgtggtaaattatacagatatttcaccttctgcacctgcctggccttcctgggaggagccctggctgctcctgccctgtggtctgggttagctgctgttccatgccatttgctggtgtttccctgagaacttctcacacatgtcttttcttgctttagagttaaacttattgttgtgagctaacaacacactaattgtacacaggtactcacaccatcacccctgcatattccccccacagcaatagacactcacattcacacccatgtgggccacacatccacacccactcacccatgcacactgcaccacacacttaacccaccccataccacacacatcacaccacacacaacacgcccgaagcacacacacccacacaccacacacacacataaatcgcaaacacacatacagcaaaaataccaaagacacaccacacatcccacacacacaccacacacatcacacacgcaccacacactctccactcccccaacacacacccagcacaccccacacacacaacataaacagcaaacacgtatacatacaccatacacacacagccatggcacacacacccaccacccactgaatgcacacacaaaatatacatacatgccatcacaccatttccttccctacatgccacacgcacaagatatccccatgtagacacccacatatgacacacacaacacgcccaaacactctagtcccactgtacacacacacaccacagacacacataaatagtaaacacacatactccacaaacagcaaacacacaccacacatcccatacacacacaccacacacacaagtagtacactcccaactcctccacacaacaaactcacacactagacaccacgcaccaggtacccttcccacacacttccacagcaccccagcttatgccacacactctgcgcataccccacacacaccacacacacatgcatatatgccccctacacacactcacacccccacacacatacaacacataccctcctcagctcccacaccacatacacccacaacacaacacacacagatgcatcactcatgcacaccccacacacaccacactcacagcacatatacacacctcacatacagatcacacacacgtttacacaacacacagaccacatattaccctccccgcagacttcacacacttcaagcctcccacagcacaacttcccacacatactatacatactgcacccacacaaattacatacacacataccacacacaccaaacacatacacaccacatacacacaccacactcacacactccccacacacatcctcccccacacataccaaacaaatgcacacactccatacacgcatgcactagtgcacaccaccctttggcaaccgcagggcctccgcagttctcacttcctacacactcagaggaaggctccacagacgtcacttcaagacaggtctttgacatgaggtggaacacaggaggggtggggcagggcagggagagtgagcttctggccacaggagccagacccccagcccctcacctccactcactcacagcatcaacagtgcttctcagggccttgaagccatcctccactgcaaacacatggtccggaccgcctgccattgctgttatctacagagagcagagctggtttggactcccagcccaggggtgagcatgcagcagatccccagcccaagggagagcgtcctgcccccatgctttggaggcagcagaataccaggctctgagggccacagccttctccagccagcagcccactctcagggagtggggagctcttccaccctcccctctggtttagtaggatttatatgacatgctgtcatttctgcagtagtcatagggtggcccaactcacttgaggcagattagatgacccttcttggggtggccctaggaaagctgtctgggacacctttccatactctaaccctaacctgaccacaaggctctatattggtgcctggttaacctgtttggaattactgggtctttcctataatcagccatacccacggtataaatggtggcccccaggctccgagccctttcagcttaagggaaagaaggcattgagtattaattaccaaaatacagggagcaaaatgctgataaatacgaactgaactcacttctttgagagtgtccaaagatggatgtttcatcattgttccatcagtcatagcaataatcatgctggaaaccttgtcatctgcaggagaagcaaggagtggcctgctcagcaaaggccccagaagtgacctccaaaagttcctgtattgggagaaaagctgagtgttgggagagaagctgaggcagggcttgcatgtctgctagacttgctggctccttgcttctagcacttccgttatctcaagcagctgtatgtttctcattcacttgatacactgtttcctttcaacccccacatcctcaccacctgttttttgtttgagcaccaataaacagcatgggctcccagagctcagggcctttgcagcctccacacttgtgatggcccactggtcccactttctctctcaaactgtctttttctcattcctttgactccaccagacttcatcactcccacgatatggtgttgggtctgattagcccaacactccaggacccctgcgggctgctgggcccacagcactgatcactccagggcatgtccaggtgcccccatctcatcctccaggggagaggctgccaagagccaagcacctgctacacagagacccttagagtgagggaggtctcagcccagcacccattttacaaaagaggagctgagaggggcaggctccttctcaccaggctgcctgaaccctcacccactagcagcctgcaccacctctgcctgagggcagctgcagccaggactccacaagcacaggcctgtcccatgggtagggggaggagcagcttggctctcctgtgggcagagcctgcgggcagccctgccagcatctctgggcccaggagtacaggattccaggtaagtggtacctgggcaggggaccccacatccacctcaatgcctttccccaccaaccatgccttttcctgacaagagttgcaggcacactgtggggagggggtcggcagctgtggacagccttctgcatcatctgagacacagtcaagggatgcaagtcactcagaggggaaatgaggaagggaggaggaagactaaggtgtgtgcaagggggaaaaccccttggctcttctcttttccttttcacacagcccagctggagggcaagcacctcagggttatcagcaccagaactgcacacgcaggatcccacacagttctcagaactccatggggcgagggcttactatgctcattgcaccagggagggacctggacctcagaacaggtgagcaacttgctccaagaggcagggcaggtgtggccttgcagagtctgcacacagagctctctgaggctcacgcccagctctgttccacctatgggaccaccatggggacggcaggtgcttaaacctggagttgaaattttccatctgccgaattgcctgcaagaaaatgaagaaatattgagcctggacagtgaaatgttcccactgatgctctaagaccttgtcaactagaatcgattcttggagctcaaggggtgtatacatttctaaaccctgcctgcatgaatatgtgtccttcaggcaccattttctgaagtttgtcgagaccctcttttattttcttcctgaaaaaactccaaaaaagtggttgacgtggaaagacgtggactgctaaaaattacctctcaagctctctgggagccactgctcactgtgcaaggcctcggggatggaggagggggccaagcaagggctctgtcctgctcattccttactgtgacgttgaccatagatgacaggccttctgatctcatcctagttccagagaatgtaggcctggggaatctcaccagggccccacttagaccatctctggtgacagtgggagcttcccatggatgagcaactgtgagtcaggaactgcaatggggccgatattcctaaccctaaccctaaccctgaaccggggatgggcaactgagagtcagtcactgacaatggggttgacattcctaactctaactctaactctaactctaactctaactctaactctaactctaactctaactctaactctaactctaactctaactctaactctaactctaactctaactctaactctaactctaactctaactctaactctaactctaactctaactctaactctaactctaactctaactctaactctaactctaactctaactctaactctaactctaactctaactctaactctaactctaactctaactctaactctaactctaactctaactctaactctaactctaactctaactctaactctaactctaactctaactctaactctaactctaactctaactctaactctaactctaactctaactctaactctaactctaactctaactctaactctaactctaactctaactctaactctaactctaactctaactctaactctaactctaactctaactctaactctaactctaactctaactctaactctaactctaactctaactctaactctaactctaactctaactctaactctaactctaaactctaactcaactctaacactctaactctaactctaatccaaactctaacccaagaaggactctcttgtgttgggcactccgtcctttaacagggagggctgcatttgggaaaagtcatcctgctaagcccccagccctgcacccagacctcacagccccagacccctgaccctgactcagtttcttcctctctctttaccctggtacaggaaataccaaatctgcttaattagactgcctggactccttgacttcctgtgcccttgaaacaaaaagaccaaaagctggagaggcagccctgacggctgtgcatgcaggggctgaacactgatctgcagactggctgggggatgtggcctgtcagctgctgttaaagcagacagaatgggctggggcagccaggactggctctggtggcaggactgggacaggctggggacttagggtcaggctaatccaatgtgacaggctgagcctgcacagcaaggctgagcagagcatggaccctgaaggatggcttcccactgcgggcagacagtccctgccatggccggagctctaagagccctgcctgcccagctcaggaggggagaaggccagacccatccatacccagaagaggccatggcctggccttcctctggccatgcccaaaccccactccccttctgggtcacccgccacagtcctccccaatagacttgctttttaccacctcacacccactccagtctctctgccaaacccacagcgcaggacacacagatccaagcctccccctagctcaagatgtggcagcccaccttgtatcccctcgaagctgcaaatagggtccaggcccccatccagtcctcagtatcctcacctctctcttgcacttcacctcctctgggcccagttctgggcatgtgcattggaagtgccctcatctcccgccaaacaggaactctgcagtgcaccctgctaggtctgggcacctctctaggccacctcaagccacctgagcttgctcctcctacctccctcccaccagtttcccagcctggcctggagctcagaaccccacacagggactcccctgtctgggcctgccagcatccctgcactaaagccccatgactctcaccactggctctgaccctgtctccctccttcactggccagggcaggaggaacaggcacagagcagcagccagcacaggtgtgtgttcacaggacacacactcccaccctgccagcccctgcaccccaggaatcttcacagccacctcccagggaaggaggcagggtagagggagggcaggggagtgtgaacggggaggctgagaaattctggagcacaggggcctgcaggtaaccttgcagccatgggtaggaggatgcaggggatccggggctaaggtcagggtgggtactgtgagttgccctgaccggccttctccatgtgctgtcaggctcccaaccaaggtctctgggagcccttcagctccctggagctccctatggctcagctcatcaggcctccctttggggctcaaagcagcactcacttgtctgaggtgagtggcaagacagtgtcgccatctgtggagtaggtgacaaaagacatccgcatatttgcgctgagaaggaatcaagtactggtgaaaagccggaggcactggctcagaagccagggtgagtgatgccagttccccacctcccaccccaactctgttatgaattccctgttgtgattaacaggaaggttgacatggtgactttgtgacctgcagctcttcccagtgtcctgcatgttgacaacaccagggggaggcacaggacctttggaggggccacaagaggaagcctccatttcccttacaacagccctcatagtgtcccttaaaacccccagaccctgccatttgtttactggaagagttagcccaggtgacctaggtgaggacattgctgtgggtgaggaggtcaaggactgggaggccagagtgttggcagtgacaggtcatttgtgtgacactgaagtcccccagggggtagcagatctggaaggagacggaaactgcagtgttgccagagtctttgtgaatgagggacattccggttctctactgctgtgcaccagaccaccttcatttagggacacagagcaggcccattttattatgctcacaggttctgaggatcaggcactcggggcagagtgggaagggctcctcgtgtctggggccccagatgggaaggcttgagcagcccaacatgacttgaaggattgggcactggaattatctggaggctgctccactcacaagtgtggctcctgggcaggagggctcaaaagctgggctcagctgggactgcgaatggagaccctgcatgtagcctccctgtgtgacctgggcttcctcccagcatggcagcttcaggatgcttgggcttttacaggtggcccagaggtccaagagtgagtattttcagtgagcaaggcagaaattgtagacttttatgatatcaccttggaagtcacacagtgtcacttccactgtactctattggtccaagcagtcacagctgccaagagtcaatgggagggaacacaggccctctctctagggcagaagtgtggatgagttcacatcccagtgtcaaaactactgtatgacaaatgctttgaatggcagagacgttacagtgtgtggaaaaacgtgggtactgatgatgggattcaagttggactcagaaaagttagactgtgatagttagaaataccttaattttattttcttcatttttgtatgcagaagtgatatatgattaaaaattcttcttcaataagtctaaaatagatctttcaatgtatttgacacaaaaattacaagtgatagccaggaagggtaactcatgcctgtaatctctgcactttgggaagctgaggccagcagatgacttgaggtcaggattttgagagctgcctggccagcatggtgaaaccccatctctactaaaaatacaaaaattagccaggtgtggtggtgcacatctgtaatcccaactactcgggaggctgaggcagaagaatcacttgaatctgtgaggcggaggttgtagattgcaagattgtgccattgcattccagcctgagtgagactcttcctccaaaaaaaaaaacaaaaaattacaagtgataaaaagcactgggttagtggactttggggggtttctgtcttgctttggagtggtgtttaaaacaatggattattttaaataagtggtattttagaatgggtagagttggtgtaattcctctgaaagcatattaggttttcctgcttcacatccttcgtgacccttggtagtgccatattttattttattttatttttaattatgttttgacatctaatcaatagacaaaagtattgtcttaatttgcagtttcctaattactaaacagttgttcatctgttctcatgattttgggtcattcctgtttcctcctttgtgaagtgcctgctcatgcctgtgtgtccattctctgatttgggtgtttatcttttgcgtattgattcattcatattctttaaattctgaatactaatcgtttatcaattgttgcaaatatcttcttccatggtgtggcttgttttttcactctatttgttgtctcttagtaaagcaaaagttgttcattttaatccagttgtttgtcatttttctttttcttttgtttttttgttgttggtggtgatggtggtggtagtggtggtttttgtttgtttgtttgctttgttttgttttgagacagagtctctctctgttgcccaggctggagtgcagtggtgtgatctcggctcactgcaacctctgcctcccgggttcaaacaattctctgcctcagcctcccaagtagctggaattacaggcaacccccaccacgcccagctaatttttgtatttttagtagagatgaggtttcaccatcttggccaggcttgtcttgaactcctgacctcgtgatcaacccgcctcagcctcccaaagtgttgtcattttcttaaactttaagatttgctctgttttatatcttaagaatttcttccgttagaggtgaaatacattttattttacaagttttaaagatttgcctttcacattgaagtcttgattctacctagaattaatttataagtgtgatttgtgccagatatttgatttcattttttgccatgaagctaacaaattgtcccagctccatttgtggaaaattccatcttttgcctattgatctcgtcactacttgtgtttcaagttccatatagatttgaatctgtttttatttatttatttattttgagatggagtctttctctgttgcccaggctgtgtagtgcagtggcaccatctcaactcactgcaacctctgcctcccaggttcaagcgattataatgcctcagtctcccgagtggctgggattacaggcactaggatgtgcagcgttccttgggaacctggggtggatacgtgggagaatgatatatacacatgagaaatatagtttgtgcttttcagatgattaaattgggagagggaagggggtaaccagaagataacctagactcatctgacacatacacaaagttcttcacatacacactgcgcctggctaatttttgtatttttagtacagactaggtttcaccacgttggccaggctgccaatctctatctattggcttatattgatagcatccataccacattatcttaatgactatatggaggaagactgtattactgtccatcattgtccctttccatttaagggaagggctgcgctccctgccatgtttgtggcaggttttgattgaccaatggaatgttaacagaagtaatgtgtgccacttctggacagaaaatgtttaagagtctaggtatgacttaggtggccccgacagcctggtgcctgagcaactaggatgtgtggcgttcccttgggaacctggaatggatacgtgggagaatgatatatacacatgagaaatatagtttgtgcttttcagatgattaaatggggagagggaagggggtatctggaagataacctagactcatctgacacatatacaaagttctacagcaagtcttcacacaatacggtcaatcatccacttttttttcttctggttattgttggctatttgctctttgacataaattttagaatcagctcatcgagtctcctctctcccaaaaacttcttaatgtttgattacaataacattaaatgtatggattcatttggaagaaacaggtctgcagtgagagttgtcctatcagtgaatatgacacatggcatatgtctgtttatacaggtcttttccagtgcctttcagataaattcccctatgaagattttgacctcattggtccagtgccttcccaaaatacactacattttactactattgtaaatgataatttaaaagtttttaaactgtgtatcatatacagaaatgtacttacatgtttatatattgacccacctcactaaactctcttctatgaatttatctgtagattcattttgatttcttgtaaaatataattttttttaaaaaaagaataagaattgtgctgactagttctccaatccaatgttgactagtgatggaggcactcttgattttacagagaatgtttctaacatcacaattaacaatgatattctttgaaggcttttggtagaaattctttatcagattagaaagtttctctactaatcttggtttgctacaagtcacaaacaagtgttttatctaaatgcttcttctggtattttgtgatgaacatgtatttctgtccagtaatctaaatttagtatgtttagatacattaatgcatgcaaaaccaattttaaaatgctataaataaacctaacttggccatgatattttaaaacatgctagagtttagtcataatttagaacttgttgtttatctatgatcatgagagagatgggtccatactttccgatttctgtgctgtccttatctgtttttggtattaggtcataggagactcataaaatgcacctggaggtttgctctttctcctaggaaggactttgaacatgataaatataatctgctctttgaatatctggtatgatatcatccttgcgttttcttttgagaagactttaaaatgatataatttaataatttctggatgttatgaattctgtctcccccaaaatgggtatgttgaagccctcactggtgatgtgactgaattattaggacataggggctttaaggaggtaattaaggttaaatgaggccataagattaagcccttaatcaactaggactgatgtccttacaagaagagagacgccagagttttctcttcaaggatgcacagagcaaaggccatgtgaaaactccatgagaaggtctctgcaagccaagaagaggagtctcatcagagaccaatcctggtggcaccttgatcatagactttcagcctccaggactggttgcaaataaatttttattgtttaagccccccagcctgtggtattttcttatgacacccagagcagactaacatttatttatttattttttattattatttttgagatggagactcactttgtcgcccaggttggagtgcagtggcgtgatgttggctcactgcaacctctgcttcccaggctcaagagattctcctgcctcagcctcgagagtagctgagattacagggacgcgccaccaggctcagttaatttttgtatttttagtagagacagggtttcactgtgttgcccaggctggtcttgaactcctgacctcaagtgatcagcccgccttggatcccaaagtgctgggattacagccatgagccaccatgcctggccctaatacttacttagtgtttctgtttctgtcaattcatatgacatatttttctaggaatttgaacattaattagcatgccttgttataaagttgttcagaatgtttttaattcttatatttctgctctatctgtagttacatctttttaattcctattattgcttagttgtgccttctctttttctaggcattctaaacagggaggatattgtccctaaaggagtgaaaattagccttgtgtgggtcttactcttttaaaatataaaacgcagatatgtatacagtacataaagggcaatctagtatatatgtggaatcaaaatttcatgggggttaacgaggagatactattaagaaaaataaagcctaaaacatttcccaggatggggagattagaatgaaaaacagaaaaggataggaagcactgtcttgttttctgatcaatttcactagcgtattgtctatgttagcaaacctttcaaataacctttagatttgttattactctctattgcattttttgttttctatttatagttatttatttaatatcctctacctttcactttctgtgggttcattttgctactctttttctcatattttcatttagattattagctctttattttcaaccctctttgctgcaaaataaacctaataggccgcaaatttccctctaagtttctctttcactgaatctcataagttttcatatttaatattttattatcagttgattttaatttcagtgttgatttctactttgatacattcaattttcaacttccaattttatgtggttttaaaaaattctttttgtcattgatttccaacctaatcgcattataatcagagaacatggtctgtatgatactgtttctttgaattttattgagatttgtttcaatacatgatttgggggaggattctttagaagaccattaaaaccaagtttattaattgtgttgttcaaatcttctaagtttttagtaacactgtgtctactcaacacatgcgtgttgaaatttctcaaatacatggtgggtttcacaatttctccttatagtttatgttttttgttttattttattaggtgcatgcaagtttagaattgttatggctgtctagaaaatgcagctgattgggaactgatcctcttaaaccctggtcacgctttctctgtgctgaagactcccgcttccttttggtttccccagcatcccggccacatctctgtatcttttcccatccttttatgttaaacttttttatgtccttatgtattagatgtgtctctttttgaaagtatatagctggtttctgttgttgttgttgttgttttgagacatggtctcactctgttgcccaggctggagtgcagtggtgcgatattggcttactgcaacctctgcctcctgggttcaagacattctcgtgcctcagcctcccgagtacctgagactacaggtgcacacctacacattcgattagtttttgtattttttttggtagtgacggggattcaccatgttggccaggctggtctcgaactcctgacctcgaatgatccgcctaccttggcctcccaaagtcctgggattataggtgtgatcccaccctgcccagccaatttttgtttaagagtcagggcctcactctgttgcccaagccagagtgcagtggtgcactcatagctcactataacctggaacttctaggctcaagtgatcctcctgcctcccacagtccggtaagtaggactatagtgtgcgccaccacacccacctatttttgttttctgtggtttctttttttggttttttttgtttgtttgtttgtttgtttgtttgagagaaaggttcttgctatgttgcacagactggcctcaagcagtcctcccacatctgcctcccagagctatggaattacaggcatgagccacggtgctggattggatttttttttctttttcttttcttttttagcagacaaattttgactttaaatggcaagttaagtacattgtggggagcacgaaactgcaccaatcagatctctgactgtggggagtaggactaggggaagggagtgttttgggaatccactctctaccaccacaatgggccaccacattcacagaaagaccacatccctcacaggcttcttttagccagaggccagcagggatatgaaaacaggcccatgcctaggaaatctcagactcctcagatggctcaaggtctcccaagctgcttggataaactttcctggaagtggtctccctctgaaattattctatccttttattttcagaaaactccccatattggtgatggtcattattttccgtacctagccactcaccttaatcagtgtgttcccagcttctttgctcaccgtcatttcttgaactccactcttccaaattgtttccttctttctgaaatacattcttatcctttcatcaaggttgtacaggttgtaaactcacactttgcacatctgacaataccttcattttgtgctcacacttgatttatattccagatagatacagaattctatttttgaggcacccaaggacatatcactggtggctgtggcaactttatcattggtttcaccaccagtctttcctgggtaatctgtgttttgagtttggtgactttcaaattgttttctttgtctctgatgttctgcatttcggatttgatgtctctctctattcctcaatgttctctcttccataaaagaaaagttttgcttcaggactgtcagaggcagtcaaaccagaacgactccattttgagtgagggctaggaaaatgaggcggggacttgctgggctgcgttctcagaaagctaggcattcctcgcctctagatgttcacagttaagggaacaaattaataatgtttactaaacagacccagacttgggagtatccagatatcaagatatctggagaacaacggcattcctaattttgctttaaagataatattgatgcttgcaaaatagagtaattaagaaaatgaatcctttatcacaaacccttttgcagagcacatctccccatctacacaagcgttgtacctaggatgggggctttactcctcttactttcgggaacgtcccactctgtctatggagtagctgcactttgaccacttgactttcttaataaacttgcttttgctttgcactgcagactcgccctgaattctttcttgcgtaagattcaagaaccctctcttggtgtttagatggggacccctttcctgtaacaggaccatctctaaggtttgatatatgttctgaacccaacttccccctcatcagacttatgtttgtccttgaggatctcatctttgcaacagaccctccaaagccttggagagaaactcagcgcttcctcacggtatctccgcgcacccactcacccctaccacgtcagaacacccactgagtgacggaattaatcaatgagggagcagggactcggggtggttttcctttcagtacttgaagaattctcccttctccaaaggaagctactttgcaccctacgctcaagcaatgtgacccatgcacacttgcctgcaacagcaccaagaactgcaattacctgagactctatcccatctaccctcactccaccactgcaggggaaagcccaggtcctccgagtcccagcgcagtctccacccaccccacagtcattccgtccagaccacggcccttctgccctggccccctgccaccctccaggggcagttaagtccctggacacctctatgttctaagggtcgcggagccccccttcctggcaaagtgctgcgcggtcacagctggggcgaggggagcggaggtgtcggggcgctcctggaggatctgggctacttgggccctggggaggtgccgctagcggggccgccaggtcgcgcggggagggagagccgggaggccacggaggtcctccgcgaagagggagccacaggcacggggcgcatcgccgcggcccccctggcgcaggagtgagaggtcggggagcctagagccagagggccgcagcgagagctggagccgccttcaagggatgccctcgccctcccgcaggcgccggcgcccggcccagcccgagccatcagagggctgtccgccgagctgagcccggggagggctgggctgcccagctgatcagaggctttctcccggattgcgagttctctggcccgcggcaccctcccgcgcgggggccgcccacccacaagccctgccccgaaggcgtgtgcggccaggaaggcggggcctggtgtcctcagggctctggcgccaagttcagagccgcgcgctgggcgcttggcggtggcggccgcgtctgcacctcctccctgcgcgccgcctgacagtctggagagacaacttagcttgagcccattttacagatggaaacccgaggctcagagaggttgagtgctttgctcagggttactgagaggagtgaggtttctgcatctgcctcttcggaggcattggctgaaattcatctctgatgtcaggcaccccctctgaggaatctgctcggaaaaggcatcgggagctgcagcacgtggtttgcatcctctccatgcaacaaaggacctagacttccaggagtcacagggtagtctgcagggcagggtagagatgttccacagaagctggtcaaaagctggaatatcattaaagatcacaatataccacaacatcaggttccattatttctgaggaggcaaagcaactacatattttagaaatttactgttaatttcttatttccagtcagtctcacccaaatgtttcaagtgcaaagccctggcctcccactgtcttcccacaacccaggtctgtatcctgtcccttgcctcccctgcacctggcattgcacagaaggtgtgggtggcaatgtcccctaaaagcttctgcaaggcttagcttcctgctgtgctgtctgtgcctctatgagtaaacgcaaaatgtcaagaaaaggattcaattgtcttgtatctaaaaccaggtatttttttcaggtgaccctgaaaattcagagatttataatttgatcatctatgtactttttcccaggaaaggcactgaacgggttacatgtgcagatctttgtatatactctgttggagaaaggatctgggctgaagacgccagcacctagcacaagccctggatgagaataatggggcactacaagatgaacagagagagggctggggcggggaggggtggatgcaaacgattatggccaagaagtcaccttaggggaaaaacataagaagaattcttgcttgcaagagagaaggaagcctatagggagagtgaggggagaggccgaaagagagagaaggaaaaaggataaaagagaaatagccaacaaggcggacacaagaaaaagggagagatgagagaaacaggagaggacaaggagacaagaagcagagaggcaagagacagggacagcaatgggactcggaaaggacatgggagagagctggaggaagctgacagagggaagggaagaaccccccgccgtcaaaggcaggactcaagaacgctgcctttcgtgcaagtgagatgggctccgctgcccgcgcccgcttgttctcggtcttggccgacctgagggtgcgtctctcccgggctctccagaggcgcgcagggggggaagtgcagacgcggccgccaccgcccagcccagggcgcggctctgaacttggcgccagcgcccagaggccaccaggccccgccttcctggctgcacccgccttcggggcggggcttgcggttgggcggctccggcgggtagggcgtcgcgggccagagaaacggcaacctgggagaaacccccctattgatccgttgggcggcccggccctcccccggctcagctccccggagccacccccagctggctcggaccgggactggcgcctgcgactatgcctgcgggagggcgagggcgtcctttggaggcggttccctctcacgccgccgccctctggctcctgggcctgccgggtctcggcgatgggcgagggctgtgcccggtgcctgcggctccctccgcgccgtggacccccgcggcctcccggccttccttaccccggcggcctggcggccccgcgagcttcacctccccagcatccgaatcgcgcagctcctcccgcgagcgcccgccgccttcgctccccaggccccagctgagaccgccaggaaggcgggctcctcgaccccagatcataagaggtgtctgggaactaagggtgggagggggccagggtagaaaatgtcagttcaagtacgttaaaattaagaacttaggctttgtttaaaaaacaataaatgaagtgaaaaaaacaagccacagagtaaaagaagatacttgcagcaagtgataaaggattagtatccaggatatataaagactgttattgagtcaatgtgaaagagaaaaacacctgaagcaaagaatggatgccggcattaaataggcacttcaaagaggaaccatgaacgaccaaaatcaagtgagtaggtgaccagttcccattagtaattaggaaatagcaaattaagaccacaaagagggcagtgagggtggctcacacacctctaatctcagcgcttgggagtccagggccagaggatcccttgaggccaggaggtggagtctagcctgggaaacatagcaagaccctgtctctacaaaaaaataaataaataaaataagaaaaaagtaaaccacaaggagatgacttaccaccaggcaaaaatattaaagtatgctaataccaagtatcaagaagaatgaagcaagatagctcaaatatgcttttgaaggaaatatactgggcttcattcattctgaaataccccttatttaagatactctattatattaaatacagttccaaaacaaaagaaatcaaagaacaaaaaactaacccaatacttttatcacttgtaatttgtatattacacatattgaaagatatattttagacttattagagaacgatttttaattggatatcactcttgtgcatacaaaataaaataaaattgattaaggtgtttctaacagttacagtctgacttttctgagtcctgtttgagtctcactcattggtgcctacgtctttccacacactgtaacctctctgctattcaaagcgttggtcatacagcagttttgacactgggatgtgaacctgtccacattctttccctagagagggggcctgtgttcctgcccattgactcttggcagctgtgactgcttggaccaatagagcacagtggaagtgacactgtgtgacttccaaggtgatgtcataaaaagctctacagtttctgccgtgctcactgaaaatactcactcttggacctctgggccacctgtaaaagcccaagcaccctgaagctgccatgctgggaggaagcccaggtcacacggggaggctacatgcagggtctccattcacagtcccagctgagcccaggttttgggccctcctgcctaggagccacacttgtgagtggagcagcctccagataattccagtgcccaatccttcaagttatggggccccagacatgaggagccctcctaactccgccctgagtgcctgatcctcagaacctgtgagcataataaaatgggcctgttctgtgtccctaaatgtaggtggtctgttacacagcagtagagaaccggaatgtccctcattcacaaagactctggcaacactgcagtttccatctccttcccgaactgccatctcctgggggacttcagtgtcacacaaataacctcccattgccaacactctggcctcccagtccttgacctcctcacccacagcaatgtcctcacctaactcacctgggctaactcttccaatgaacaaacagcagggtctagtggttttaagggacactgtgagggctgttataagggaaatggaggcttcctcttgtagcccctccaaaggtcctgtgcctccccctgatgttgtcaacatgcaggacattgggaagagctgcaggtcacaaagtcaccatgtcaaccttcctgtcaaccataacagagaattctgtccccagggtgggggaagggccaggcaggtagctggaagcaagtctcccagagccagctgctgaccctagtccctgcgatctggggaggtacctggtggagggccatagtgtgcactggtgaaagggcaggaggaggggtgtggccccgggcataaggggaggcggcaaagaaggggcctgtgctcagcctctctgggccctggcacaggcacccaagagtgaggtggggtcacagggacagccagataatggggagccatgagtccctggggccctacttcctggtcttcctgctgctgctgctgcttcctccaccgctttttagagcaggaagccttcggtaccatggacctgactggagaatatttcaccgcctggccctgggctccaggagagcccaccaccaccatggcccaggatggaggcagcactggcgccaggggcaagcaggtcacagatgccagggctcatttgacctctacttcatcttggacaagtgagtgtcccttctagctctggccctgggtcaccctcaggagccactgtctctttttcactagggacaggacaccactcaaggagatgcaagcttccgtcacagaagcagggccaaactttggtcagaccagacctaggcctcctgtttttctgaggcagaaagaatgccctggctttcttttccctggtgcttcatctcctggatgaggaaaaaagccaccaaaggggttctggacgattccctacccctccatcagctgggtcagcatcctcatcctcacgctgctgcaacagatgattgctcggacctgcctctcagcagttctcagatgctcactgcggatgtttggggtttctgtgttgttttgcttgtttgttttttcacgcaaatgacttctattttactgggccccacagagattgctttgttgcctgtgttgggcattctaatgtcactgcttagagaaggcctttggttggctgcttctaagtgcctcttctgcaacttggagagccacgcgatagttcctacactttcagaacagtttggtctgtttcaggctggccctggggaagctgggctacgtattaggcaccttctggctcaccaggaaagaaaagaggcaaatgttcagctttggagagattgccttggttccctttcctgctcctcctgctgggtggtaatactctgtgcttattcagtagcagcagtggtgcaatcttcaggagaatgttgcagcactttctggcctccaaagcccttcccctgcactcctggcacctcaccacaatcctgggctgtgagtagtacaggtatttttctatctggttcctggacaagggtggctcctggaggttggggaagcatccagagacagctagtgtgacaagactccggcttcctgtgctgcacactttccagcatcgcaggttgaaattcctctgatttttctcattcctcctggatactaatggttaggggacgtgtaccccagcccaccaattcccatggtttctgactgttctgctactcttggggaaggagcaactcagttctggagacaggcagagtccactcactagccacatagtcttgggcaagttgcttcatcattctgtgccttcgtgtcccccatctgtaaaaagggtatcttcattttcaccttgccaagtgtgatgaggatgaagggagaatttgcaggtcagaggcgatgacagaggatggggatgaagggacctgccaggcaaggcagagccacaggctagaaactcacaggaactgcagaggccctgatgtaatcccagacagactggatgagggggaatgcagagggagtgcctagagtggatgtaaagggagcagacaaaagcaaccttaatgagtcttcctaacaaggctgggggtaaagggcattgccccattctaaggaggaggcaatgagccaggtcatggccagggaatgacccaccacagcctccagatagaccatggtgctgaattgaaactctggattttgtgactccaaagcccatccaaagaccacgcagctgggcgggaccctgagaaacttgcggtaatcctccaggcagaaacaacatctactgcctgcaggcaggctctttggtcattagcgtccagcttattcatgagactcattattcacttgttcattgattggattgagctggaagaaaatgaatcagcctcccatgcgctcctattcttggccaggtgacatttgagggctctaagtgggaatgaccccttgtattttttgagtaattttttaattgtgggaaaacatacataacaaaaatttaccatttttaagtgtacaattcagcggcattaagtacattcacagtgttgtgcaatcaccaccatccatctccagaaatgtttcatcattgcgtattgaaactctattctcagccgggagcagtagctccctcctgtaatcccagcaatttgggagccaaggcaagaggatcgcttgagtctaggagttcaagatcagcctgggaaacatgcaaaatcctgtccatacaaaacatacaaaaattagccaggcatggtgatgtgtgcctccactcccagctactcagcctgagctgaggcaggaggatcgcttgagcctgagaggtcaagactgctgtgtgtcaagattacaccactgcactccatcctgggcgacagagtgagaccctgtctcaaaccccatccccatcaaaacccaaaaaacttctatttccattaaacaataactccccattcctcccttccccaagccctagtgacctttagtgtattttctctatctatgagtttgcctattgtaggtacttcatgtaaggggagtcacacaatgtaatcaagcaaacatataatatttggccttttctgtctgacctttttcacttagcataatgttttcaagtttatcccatgttgtcgcatccatcagaatttcatcccttttatggctgaataatatttctctgtatgtatatgtaccacattttctttatcttttttttttttttttttgagttggagtattctgctgcctggctggagttcagcggcgcgatctcggctcattgcaacctccacctcccagtttcaagcgattctccctgcatcagcctcctgagtagctgggactacaggggcatgccaccacgccaggctaatttttgtattttttagtacatacagggtttcaccatattggacaggttggtcttgaactcctgacctcgtgattccccggccttggccttccaaagcgctgggattccaagcgtgagccacctcgcccggcctgtttatcttttcgtctgttgatggacacttgggttgcttctgccatttggcaattgtgaataatgctgctatgaacgctggtgtatacgtatctcttggagtccctactctcacttctttttggtatatgccagggagtgcaattgatggatcctatggtgatcctatgtttagctttctgaggaaatgccaagctgtttcccacagtgattgcaccattttgcattcccaccaacaaaagcccaacatttgctattttctggtttttgataatagtcaccccaatgggtgtgaagttgtatctccttgaggctttcattggcatttccctagtgactagtgatgtggagcatcttttcatgtgcttattggccatttgcatatcttctttgaggaaatgtctattcaaatcctttgcccattttttttgttgcatttttttgttgtttctttttcgttgttgttgtaggagttctttgtatattctggatattaatcccttatcaggtatatgagttgtaaatatttcctcccattctgcaggttgtcttttcactcctttggtagtgtcctttgatgcacaaaagtttttaatctggatacagtctcaacttttctatttttaattttgttgcctgtgtttttggtgccatatccaaaaaaatccccaaatctaatgtcataaaagttatgttttctactaagagcttaaaagttttagcctttacatttaggtctttgacccattttgagtgaatttctgtaatggtttacagaagggtccaacttcattcttttgcacatagacatccaattttccctgcaccatttcttgaaactactgttctttcccacactgagtgttcttagcacactggttggaaatcgtttgaccacagacatgacaggttatttctgagctctctgttctgttcattgctctacatgtcagtccttacatcagtgccataatagtttgattactgtagctttgtaataaattctgaaatcaggaaatgtgtatcctcaatcttgttcttctttttcagatttttttttttgctgtatgactaatgtcccttgaaattccatatgaaatctagtgcaaatttttttatttctgcaaaaaatgctgtagagattttgatacagattacattgttatcttaacaatattattattgtgccttctgattcataagcatgcaatatctttccatttattgtgtctttaaattctttcagcaatgttctatagttttcagtacacatttctttagcttccttgtttaaatttattcttaagtattttgttctgtttgatgctatcataaatgaaacttttttggttgattttctatatttggattgttcactgggggcttttccaaccagtacattctctcccatttccactctacacagtgccccacctaacctgatcagccacctggatggcaacaaaagccccacatcccaggaagctcctcagtcccaggcagatggggctgggtggtcaccttatgctgaccactcaactggtgaaactcatgacctcggatgatccagtggccactgggggtgtaccccagcctcagctgtgctggggtcaggagagcttgttaagagcctgctgggaggctgggggcggggcagacacttgcccatcggagagatgcactcatctccctgacccacatctccttttgttttaggtctggcagcgtgaacaataactggattgacctttatatgtgggtggaggaaacagtggcgaggttccaaaggtacagatctctgcatggcagcctcccctgagctgcagagagcttttcttctggaaggcaggcagagggcacatcccatcagatggggtgggcgtgggagtccttcagtgggggacacagagcacaaggtggcattctgaagcaggaatgaggccagcactcactggttccatggggtctcagcggccttggctggctcctgcctgtgagcccagacatattgcaggggaggcagtttgcccttggggacatcacacgctgggaagggacaataggcagggaaaccagtgactcagtcctggaactccgagttgctgagggttcaagtagggggcaaagaactccgtggaaggttaaaggaaaaaacaggaactcctaaggacaaagtcaaggatggcttccaaggatgtgggtctttgaactgggtcttgcaggatggaaaagacaggggacctgtggtggcgtgagtggtctgacttggctgggaatgagattagctcagggagggctgggagagggctgggcaggtcagcttgaggccaaagccacaggggctcattatgccaggccaaggagctgggatttcctgctctgagccatagagagccagagaaggctcttgagcaggggagtggcatgatcaagatggcacttaaggaagaaaagtctgatgactgtgggtaaaatgaatgggcaacaagggcaggagccatggggagctccgctggggacgtatggcagcactgtcgctgagggccactgagggtcagccggcaggaaggagggtcagggagaggaaggggaggctgtgtgcatggctgccaatagggagagtcacttgtctgagatgaaggagggatgacggagaggagagggaggagggaatggggtgaagaggcaaagaattttccagtagaagggaggccagctgggagggctgtatgtgcatctccctgcctgttcattataaggtatgtgtgtctgtgtgtgtgtgtgtgcaggtgcctgagtgtgggtgccgtgtgtgcgtgttcatatgagtgtgtgcatgttcaggtgcatgtgtgtgggtgcatatgtgtgtgactgtgtgtgtgtgtgagtgtgtatgcatgtgtgtgggggggtgtgtatacctgtgcgtgtgtgagagtgtgtgcgtgtgtgcctgtgtgtgtgtgcgtgtgtgcctgtgtgtgagtgtgtgcgtgtgtgcgtgcatgtgtgtgcatgtgagtgtgcctgtgtgtgagtgtgtgcctgtgtgtgtgagtgtgtgcctgtgtgtgggtgtgtgcgtgtatgggtgcatgtgtatgggtgcatgtgtgagtgtgtgtgtatgcatgtgtgtgggtgtttgtgtggtgtgtgcacctgtgtgtgtgtgtgcctctgtgtgtgcatgtgtgtgcatatgtgtgtgagtgtgtgcctgtgtgtgcgcgtgtgtgtgtgcaagtgtctttggggtgttgggagtgtggggatgcagtgagttgccatcctgactctcccttctatggagcccttgtctccacaggcctcagagtccttcactacatttatctcacctccttgtgtccagcaaggggctccaaagcggaagagttggggtgggaggtggggaattggcctcaccaccttggcttctgagcctgtgccactggcttctcaccagcacatgattccttcacagcccaaatattcggatgtgcttcatcacctactccacagacggccagactgtcttgccactcacctcagacaagtgagtgctgctttgagccccaaagggaggcctgatgagcttggccagagggagctccagggagctgaagggctcccggagaccttggttgggagcctgacagcacacagggcaggccggtcagggcaactcacagtacccacctgaccttagccccggctcccctgcatcctcctacccatggctgcaaggttacctgcaggcccctgtgctccagaagttctcagcctcccccacttcacgctcccctgccctctctccgctctgcctccttccctgaaaggtggctgtgaggattcccagggtgcaggggctggcagggcgggggtgtgtgtcctgtgaacacacacctgtgctggctgctgctctgtgcctgttccccctgccctgaccagtgtgggagggagacagggtcaaagctggtggtgggagtagtggggctttagtgcagggatgctggcaggcccagactggggagcccctgggtggggttctgagctccagggcaggctgggaaagtggagggaggcaggaggaacaagctcaggaggctggagcccaggcccagcagggagcacagcagagttcctgtttggccggaggtgagggcacttccaatgcacatgcccggaactgggcccagaggagatgaagcacagaagagaggtgaggacactgaggactggatgggggactgggccccacttgcagtttcgagggaatacagagtaggggagcttgagtctgtgtgtcctgcgctgtgggtttgtcagagagactgggtgggtgtgaggtggtaaaaagcaagtctatgggggaggactgtggcgagtgacccagacggggagcggggtttgggcatggccagaggaaggccagggcatggcctcttctgggtatggatgggtctggcctcctcccctcctgggctgggcaggcagggctctcagagctccggccatggcagggactctctgcccacagtgggaagccatccttcagggtccatgctctgctcagccttgctgtgcaggctcagcctgtcacattgaattagcctgaccctaagtccccagcctgtcccagtcctgccaccagagccagtcctgactgccccagcccattctgtctgctttaacagcaactgacaggcctcatgccccggccagtccgcagatcagtgttcagcccctgcatgcacagctgtcggggctgcctctccagcctttggtctttttgtttcaggggcacagaaagtcaaggaggccagacactctaagcagatttgctacttcctgtatcagggtaaagatagagcaggaaactgagtcagggtcaggggtctggggtcattgggctgggtgcagggctggtggcttagcaggatgacttttcccaaatgcagccctacctgttaaaggacggagtgcccaacacaacagcgtccttgttagggttagaatttggattagagttagagttagagttaggaatgtcaaccccattgacagtggctgactctcagttgcccatccctggttcagggttaaggttagggtttgggttagagttagagttagagttagagttagagttagagttagagttaggaatgtcaaccccattgtcagtggctgactctcagttgcccatccctggttcagggttaaagttagggtttgggttagagttagagttagagttagagttagagttagagttaggaatgtcaaccccattgtcagtggctgactctcagttgcccatccctggttcagggttagggttagggttaggtttaggaaagtcagccccattgcagttcctgactcacagttgctcatccatgggaaactcctactgtcaccagagatggtccaagcagggccctggtgaagttccccaggcctgcattctctgtaactcggatgagctcagaagggcttgaaatctctggtcaaaatcacaatgaggaatgaggaggacaaagcccttgcctgggcccctccttcatccaggaggactggcgcaaagaacagtggctcccggagagcttgggagctgatttttaacagtcaatgtctttccaggtcaaccacctttttaaatttttttcaggaatagaataaaaaacggtcttgaccaacttcagaaaattgtgcctgacggtcacacattcatgcaggcaggatttagaaaggtatagaccccttgatctcctaaccctaaccctaaccctaaccctaacctacaaaatcttagagcatcagtgggagcatctcactgtccaggctcaatatttcttcattttcttgcaggcaattcaacagatcgaaagtttcaactccggaagtaagcacctgccgtccccctggtggtcctgtagggggaacagagctgggtgtgagcctcagagagctctgtgtgcagaatctgcaaggccacacctgccctgcctcttggagcaagttgctcacctgctctgagctccaggtccctccctggtgcaatgagcatagtaagccctcaccccatggagttctgagaactgtgtgggatcctgcgtgtgcagttctggtgctcataaccctgaggtgcttgccctccagctgggctgtgtgaaaaggacaagggaagagccaaggggtttgccccttgcacacaccttagccttcctcctcccttgcatgtcttccctccgagtgacttgcatcccctgaccctgtctcatatggtacagaaggctgtccagggcccccaacttccctccccactgtgttgctgcagctcttgtcaggaaaaggcagggctggagaggaaaggcgttgaggtggctgtggggtcccctgcccaggtgccactggcctggagtcctgaactcctgggcccagagatgccggcagggctgcctgcaggctctgcttacagcaagacctggccccctgggagcctccctgagcctgtctgttacaggagggcccagcagctcctccctctgcccgtgggacaggcctgtggttgtggagtcctggctggagctgccctcaggcagaggtggtgcaggtcgctagtgggtgagggttcaggcagcctggtgtgaaagaccctgcccctctcagccccttctctgtaaaatgggtgctgggctgagacctccctgactctaggaggtctctgggtggcaggtgcttgggtcttggcagcctctcctctggaggatgaggtgggggcacgtggccatgccctggagtgggcagcgctgtgggcccagccatctgcaggggttccggagcttctggaggtcactcctggtgcctttgctgagcaggccactctttgcttcttctacagacaaggttcccagcatgattattgctatgactgatggagaactggtggcacatgcatttcaggacactctcagagaagtgagtccagttcatacttaccagcattttgctccatgtattttgatgaccaatatgcaatgccttctttcccttaggctcaaaaggctcggaaactgggggccaacgtttacaccctgggtgtggctgattataatctggatcaggtaattccaagcaggtaaccaggcgccactttcaagcctagtggtcactttcgagccaaccgtcccgggccaccccaaggacggttgtctaagctgccccaagtgagttgggccaactcatggccactgcagaagtgattgacagcatgttgtataaatcccaccatgccaaaggggagggtggaagagctccccgctccctaagagtgggctgctggctggagaagtctgtgacattcagagcctgacattctgctgcccccaaagcatgagggcaagacactgtctcctgggccgggggtctgctgcatcctcacctcctggtggggagtccaacccagctctgctctctgtagataacagcaattgcagacagccctggccacgtgtttgcagtggagaatggcttcaaggccctgagaagcaccattgatgccgtgagtgggcagaggtgaggggctggggacctggatcctttggcaggaagctcactctccctgtcccgccccacccctcctgtgttccagctcacgtcaaaggtctgtcttgatgtgacatcggtggagccttcctctgagtgtgtaggaggtgagagctgcggaggccctggggtagccaaagggtggtgtgcatgagtgcatgcgtgtatggagtgtgtgcatttgtttggtatgtgtgggggaggatgtgtgtggggagtgtgtgagtgtggtgtgtgtatgtggtgtgtatgtgtttggtgtgtgtggtatgtgtgtatgtagtttgtgtgggtgcagtatgtgtagtatgtctgggaagttgtgctgtgggaggcttgatgtgtgtgaaatctgcgggagagggtaatatgtggtctgtgtgctgtggaaatgtgtgtgagattgtgtggggtgtgtatatgtgctgtgagtgtggtgtgtgtggggtgtgcatgagtgatgcatctgtgtgtgttgtattgtggggtgtatgttgtgtgggagctgaggtgctgtgtaatatgcatgtgggggtgtgagtgtacgtagggagcatatatgcgtgtgtgtgtgtggtgtatgtgcactgtgtgtgtctggcatgagtgggggtcttgtgggagtgtgtgggaaggttgcctggtgtgtggaaggctgctggtgtgtgggaagggtgtctggtgtgcaggtatgtggtgtccagtgtgtgtttgtgtcgtatggggagttgggagtgtgttgctgatgtgtgtggtgtgtgtatgggatgtgtggtgtgtctttggtatttttggtgtatgtgtgtttgctatttatgtgtgtgtgtggtgtgtgggtgtgtgtacttcgggtgtgtggtgtgtggtgtgatgtgtgtggtatggggtgggttgagtgtgtttgtggtccagtgtgcatgggtcggtgggagtggacatgtggcccacatggatgtgaatgtgtctattggtgtgggggcaatatgcgggggtggtggtgtgagtacctttgtacaattagtgtgttgtaacctcacaacggtaagtttaactctaaagcaagaaaagacatgtgtgagaagctctcagggaaacaccagcaaatggcatggagtagcagctaacccagaccacagggcaggagcagccagggctcctcccaggaaggccaggcaggtgcaggagctgaaatgtctgtgtaatttaccacatcaacaaaataggaaacaggaaccaagcggttatctcaggggatgaagaacaagaagtaggggtgtcaacatcccacagcaccctatgagcagaaggaaacttccatagcccgacaaagtcgtccacacaaacaccctcagctcacctcaatcccacaggatcaatcccagtgcctgtccatgctgtctgagacgtagcgaggatgccctcttgtcagctggggtcccagtatgggttgtgacagtcctgtgtgggcctctgtgatgcctctgtctgtcctgagctctttctgtgtaggctgggggtctgcatggccggcagttgcacaactgcggctgctggagttgaagggagccctgggtgtcctcccttcatcacgagaggacattactaggcccttagcaagaccacgaggcatccagcagctgggctctggcctccctgttcctcactgcagggtgtcctggcggtaggctgtggggacagacacaccgtatatgtctgagctctgctctccatgggcacacgaccaggagcaaattgtccaatgtcagtgagctccagaagtgcctcccatgaacagaaaagacgctgtcaggcctctcgtgagtccaaaggcactgggctgtgcagggactggcacagggctgggagctggcaggtccctgaaacaggagctacgctgacacttccatgattggtcctgggctctgtccccgaccccgcctctcccccatgcagagctgagggcaggggtggagtagagagggctctcctccccctcggggtctctttctgttcctcctgatttaaagcggctcagccgtgcagccagtgtgacagctgtgctcctctgatgatgtcccctggacacgcacagcctgtggcgtctgagcagccctgtcaaccccaggtgaggatgtgagtcttcactcctccctggaggcagctgagtcgaggtggcaggtgccctctgcccaccagctcggccttctgcctctgctcacgtggcccggcagtcacagccctgatctgtcagctgtcggctgagttgtgcaaagctgccccacatggagggtgacagtcacaggagggaaagggcaaggcaggagcctgaaacccaaatgcaacagaatgagccctctcagcaggctgccactgagaagccaggaggtctccagggagcccaggaaggaggccagggagggaggcatgcagcccagactccccctgtttagccctgggcctcctatccagcctgggagaggcctctggtggcctcaccgctcaaggcccatcctgagcccatcccccacacatggctggagggttttgacaggcatctccctctccagcctggcaggagtctgaggctcttagcagaacccccaggccctccagggtccacttcctgttctgggcgccctgtgcagaggtgggaccaggtggagcacaggcactctgcaagccttgcctcaccttgaagggccgagcccacctgtccttcacagccctgttcaaagggcacctcatcctggaagccttccctgatgaccagcccctctgactccctgcagcccaagggcttggtctgtccctctcatcagtcacttgtcacccagggtgtatcatgacttctggttgtctatgtctaagcataattttcttatttagttctttggttttcttccacccttttattgttgaaattttcaaacctgtaggtgagtggaaaggattgtacaatgaacacaaacacatctctatccaccactgggattttacaatgaatgtttggccatgttcctttatctctcccaccccccctctctcttcatccatccaccttgaaaaaaaaaaaatgcttgcttgcaatacatagtcctaacacagcccagaatgtaatttgcaattatcctgtccatggagctttggggcagcactcagccctgcttagagtggccaagttgggctgaccaaggggcgcaggccacaggcccagttgctccctcccgggcacacactgagcctagtgtctggctggccagggctttttggaagcctgagtggggaagaagttgcctggcagcatcagatttggaagcagctgctgtcagccttagctgtgggagaggaccccaggcttgccctgaggggcccatgtctagttgctcagaacagggcaccaagttggcatttcctgctgtctctcacagcctcagtgcccccaccaggcccaggctcttccaagggcagcatagtatccatcaagtgggtgactacgagagccaggctggcaccttgagcaggaagagtaggccaggcccagctggctgatgtcagcagtcagcgttgagggccttggagtgaggtgggcctcggagctcctcatctgaggagcatggttccctaggtcccagccaggagctgacatggagaaacacaaacccactaaggcctgcatttcccattttccaagaaagctggaaatctagatatttgtggttaatgttcaggcttttaactgcaggctcccattttgaaagcctcagaaagcatgtcggtaggccaacttcacccacagcccgccttgaaggtgtgacactgcagaaaggcaggaagcagggttcacaggaagctttccttgggtgcatggaccgggggcgccccaagcatcagcagggattggaatgcgtggggcctgggccaggaggcaggggtggaggccaatgcccttggcagctgcagacctgcgggaaccctggctggctcctgggtccagccgtcacctgcatgtgtcccctgtggtctttgggtcagggcaggagctacagtggtggaaggacacactccttgagcctcaggatgggtgccctgtggtccttgctggttcaggaagagcagaatatgagaaatcacctgtagttctctggaatcacagctaaaacagggcttctgtgatggattcccttgagcagggtcctaggtggctcgcctgccccacctgagtcctggccctgatgctgtgggtgtcctgcctgccacaggcacacagaaagacagggaggagagacctcgaatgttcagcagccctgaaggaggcatccaggcctgggtgcccagctgaggcatgagacatggtgtcttcaggcagcattatggctccgcttacacctgacatcagggagggcctggctgagtgcacggcctgcacacctggggccgagggagcaccacagatttcagggcaggaataccactctgagcctgccctgtgcaaggaccaaggcctttcctgagcgtgttggttcaggaatggtagggagagggtccttgagtgtgcttaaggcccagctgcctcctcctggaccctcagtgacaccagatgaagatttgacctagtggacacatagatgttggttcagacacagctctttccttacaggagcctctgtgaattcggttttgggggtggatctccaggaatagggaggtcagaggggaggcagccccctactcttcctcactcagccttttgaatgttgtccttgcagaaccctaccatgtggttattcatggaaatggctttcagaatctaaagaaacgggatgaagttatttgcagatttatcttcaatgaaagcactatcattggtaagttgtctcctctgtgcctctgagtcacgtatttcccacacaatgctgcctttccccacagccagccaagcctcccagcccttgccaaccattccctgtggaccctgtggggttagaggccatgaggacaagtggaaggaggcactgggaaggccggtcacccctcccttcatctgccaagtggggaagtaacaaatccatctgtgcctcaagagcatcttacatcagggcttcccactcagtgaggctgggtttaggactgggtctgcgatcacagctgcatctgcccaccttagcctcagtttccccttcccttgagagcccaggacccaaagcccacaaggctacttctaggaaatggtggcagccccggagatctgagcctgaatggccaggtgcaccagtagcttgcccagaggggtatgtttaccttgcactgagggaggatgccagcctgtaggcctgggccttggaatcctggctcaggcacacattgcctgtgtcaccttgaccagatgagtgttctactctgagcctctattttctcaatttaacatggaggcaatatggtgctggctatgtatcctttaactgaaatgcttgggaccacagatattttagttttcagattttttcaggttttggaacgtgtgcagtatactgatgtttcagcatcccaaaccgcaaatttgaaatctgaaattctctaatgagcatttctttcgaacatcatgttggtgctcaagaaatgtcagattttgaaggattttgggtgtggattttcatgttatagatggtcagccacagttacacctaagtaagcaaaatcacatgcgtagagcagttggttcatggaagggctatagtattttttttaaatctcctattatttggcaatagttaggcatcagggaacctctgtgatggtggaatggcctgaggaagcgcatagtccaggcagacactgtgccctgggtgctgggggtggggtgtgctcttccccactgagggcctggggtgcagttggatttttgcatcctccttgatcttcccaggtggccccttgatacattcatttgatctgatgttagtatgttcactgaaatctaattccagggccatatggtaatcccaggatgacttctcttcccccaagaggcttcttgacctttttcctcctttccatgagtacataggaaggggctgagcctgtcatccccacattcccactcatcagcattgtgtggatggtctcagggaattcagttttcattgggttatactttcttggaactgtcttagggactgagcagcccctttctaaggaaagctaatgcttactgagcacttatatcagatatcgtgccaagtgccttatgcacactatctccttgaatcctcaaagcagccttacagaaagtctttgtatgtgtcaatcagaacaacagagagtttctctctaaaagaaaacagtatttattcaggaacggtgcccggcactgggaatgtgtgtgccatagtaatgtgcataatcagggaggtaaagaagacataggcttttaaaggagaaatgaagattagggaattgttttaagaccattactcttgcctaaaaagatcagttacaagggtgacactagtccaaggctggacaggcagttcttgggcacatgttcctgtagaagtatttttttgtgttaagtctgcaatggcttttgtgcaaggttgtggtttttgcaaagtcttttgtgatatttttgttatcaggcatataggcataaaaccctctctttgtagcctttcttagccctatttgtcatggattttattttattttttaacacaaatgactccattttaattctgacaactttctcatatggatggagagctagagagaagcatgatggaagagcctgcccagggccatacagtccatgttgcagggcaggaaagcagacccaggcgatctgccttctgcctccctgtggtggcagctcctgggaaagggggtacccagcctacctccgtgagtggcattcagctgcctcctctgtgggcctgtgggtgtactggcttcccaccctggagcttaccatctacatctccatacacaggccagcaccgacgtctcacagtggggagcccatgccacagctgtgagcacctgcgtagatggccattctgctcctggttgatggctggcccaagagtaaaaagaaacttattttttaaaataattgagaacaacctttaaacctattttcactaataggaagagatccccggaacatgtccctggagtgttggccaccactgaacacgcctcccctgcacccccaactagatggcagtgtgccttccctggcggctgatgccagcctggaggtgcagttcagggatctctgtcctgcatcagtccctgtagggcagcaggggcagagcctggttctggcttctggaagcgcctggatgcaatttttgacaactgaaataacaaacagagagagtgtctctaaacagaaatgctatttattcaggaacaggacattgcaatggaaaatacatgccagagtaaactatgtgcatatttagggaggtggaaaagaaaagcagagaaagccttttaaaggaaaatgaggaggatgccataattgttttgaaatcatccttggcaaaaaagtcaataccacgggttctgccagtcctaggttggctatgcagttaatgggccctgggaagccggggtcctggcagccgagcccagtgggtagagagctggagccaggccagcaggcagatgcagcagggcccacgccctctcccgcacttcaggaggtgtgaaaagggtgtgggctcaggagtgagaatgttccatgtctacacattaccgaactctcctgagcccaccacactcccacaaaaatgagtaaatagatacataaataaacaaaaattggaaaacaaaattacagacttgaaaaaaaaaacccagtcccctcctcaggcttcctcatcttggtaaatggtgtcgctgtccacccagttgttctggtcaaacactcaaatgtcatctttgactcctctgagcttcctcttcacatccatcccaccagcaagtcctgttgcctccatgtgcaaaatacatcctggatctgcccaacctggacagattcactgcacaagaaataaaaccccaacccctttccagggcccacaaggccctgccccctgtcctgggtcacctctttccctccttgacaaggtcagcgagtcactgcccagagcattggcacatgccactctctcagccccaagcacctttacctgggatctttgcctggctggctcctcatctttttaatctcagctggaatgtcacctcttcagagataatttatcattcatggaagtttgcaacactacacaaaataacaagaattgtgcaatgaacttaaagaagccatcacctactttcaataattctcaacctgcccccacctgctttccttggaacccttaccacagagtattttgaagcaaatccctggccttgcattatttcatgttcctctagaccagaaattgtggctctacaagataggagaagtcatgcataatgaagcggctgtcccttcctctctggttccctcacctcctctggtcatggacatcacagcacattgcactctctgtcatctgttttgtcctgttttttattttgttttctgtgtcccgtgcaatccctaaaggtgagtccttgagagcagggactctgcctgcctgttcctgttacacaacagagtgctgcacagggcctgggtgtggcgggtgcttgcaggggtctgtgcaataggaaggcagagcccacatgccggtcctgggccacagggtcagccctgcatgctgaggacagacatggggaggaacagtggacagacaggtgcactgacattcttctcatgtcattttcttttagatgaaaagccaaccagtatcgacaataattccatgaattgccctgggccaaaactagaaaaacctggagagtaagtgcccctggcaggaggctagagggcaagagaccagggagtcagggttgggcaccttgaggtgtacaaaatgtggatgccccccaccccctgctgggacagcacatatctgtggctgcgcaaagagcaccctcctccccacatcccttgttagtgacccccaaggtattcagggatctgcagcatcctagggtctgtgaggaaggcaggatgcaggagatgattgcccaaggaatggtacctttgctccaggttgcctctcagagttaagccaacacactctgtaaatacagaagagccaggatggtgacaccaagcagcagtccctggtcatttaggacgcggtcacaatggcatgagaccccatgcagggcccctcactgtctgacccacttaccctttggtcatcattgctaagtttacctgcaagtgtttggggaatgacctctcattacccatgctgtccaagggcaagaactgcatctctctggactggctctcaccatctgcattttctatgctttagggagtactctattgaagtcagcttgaacaaaggcaaaacattcttcaagagcaatgtcagcatcaccagcaccacatgtgtgagtaccagcatggggctgcaaacatgtatgaggactgtccagagcctctgcactagaaggagcacagaaaaggcagaccgttcccaggcagtcccagaaagtagcgtgtgcagcaggcacctgaggctgctccaacccggcttctggatggtgcaggtgggtgaggctgggaggctgtctgccaggagccagagtccagcacctctaggccaggacctcaggcccaggagccctggaggattccacacactgccgtcagggtatgtgtgtgctgctgaactggtgccccagctactgatctggtcctgaacctgctgatgaccctggcccctgagcctgcctggtggtcacttgctgtcatttcccagatgccttcagccccctttctgcctctcctccttgctcaggcccctgagatgtccctctctgctccctcgccaagccctgtagtatgtcccctcctgctgctgaaggggaggctctcaggcactcggacccgagctcagctccaagaggcccctgggaatggagatgctgtgccccaggtgcctgctcttcagagctccatgtctttgggcagtttggcccagggccgcataggcaggaggatgtgctggagggacgggcgggaggcctgagcccactccactgccttgtacccagtctcacttgtgaggacacaccagtgttgagagtcttccctctgggtctatccttgcctgtccctgcacatccatgcatggatctgcaggctgaatgcacgcattccccatcaggaatctacccactgatggcccaactgtgacagacacatcaggagcagccatggggctcccacctcgccagcggccttcatgctcagcctcagtggttcctctccttcagccagccgggttcccagcacaggcccctgccccttccctcccctcccctcccctcccctcctctccactcccctcccctcccctctccagccttctcttaagtagagctctggacatgaggaaggcctgagcagcctgccttcccacggatgccgcccaagattcctttattgcgaagaacacccagagaactgttcccgttgcttataccccatgtggccctggttctgagccaggacttggagctctctaaacctcacaagtgcccccagggagggcggctcattccctttgcacaggtgtggaggctgaggctcagagcagtgcgtggatgtgcccacggtgcagagcctggaagtggggagagaggctgtgggggatggacccgggtctcctgcccctgctcctgtgcctgcacctccaccctcacctgtctttgtaccggtagattttgtggtcctcacagaagccctgtgctgcaggcgaggtgtgcagtgagggtgggatcatcagaccatggaagcttccgggactttcttggcagggctctggggcagagactttcagcagggccagagaaagggtctatagctctctggggcccagccctggccgctggccccactgtagtacccggatgcggggccagctagggagagtgaggagtgggcagatgggccaccaagtggtgggcacggggaagaggccaccgaggccctcctatggtgctctctttctccaccagggcattttccgcaactggctctattttgtgccactcctgctgcttgtgccactgctgctgtgttgtgtctggcggctgtgccgcaagcaggcaagtgctccctgcccgcccagctctggggcccaggcacaggcccaccctctgagggactctaacatgtgactgccccccgtgatcccgcctgtgggaagtttccctcagctcccagctcatcacgtgagcccagggagtcgcagacctgtccacacgttcccagagcctagcaagcctgggcttctgcagggcctcctgccccgggctggccacagagagctggcctggaatgccctggacatggggttgaggcctgccctggctcctagagagaagtgaccccagaacccctgaaaccagggctgcctcaacaatccagacttctggaagcctcagatggacaagggccaggaggtggcctctgtgtggagggaggaagagaggggcccccatgaggccctgctggcccaaatggaggacgctgtaacccccagctgtctgtaccttgaggaaccagtgtggatctcggcacatgtctagttccttccccattccttcatctgtctttactgagctccagcttcccctgggccccatactgggctgggcagggacagaaatggtggctaccattccccacaggcagctcacagttctgtcctgtcatggctgagggtgaaatgtccaccccacaggagtgggaagggctccctgtaaggcggagcaggacccaaaagcagagatggagcccggggcagggaagatggaaggggtgctgggagctggggtggacggacccagctcagagagctgcagacagagaacagagcagaaggaggagagcgcagagctcagcccagggaacacacagggctcatgtctgcatagggagctgcaaggggaggaagcccgggactcagccatgaggctgggaggtcagggagggctcctgtagacagacaggctctccctaaggaagggaagtggggcgaacgctgtcttctccatgtggctgtgggcagagaaggacacttgtaggggctgggcctcactagggacctggtccctggcctggctgacccctaggaaccccacagcggcggtacaggggttcccctttggtaaggttggaggctgaggcccaggaggaggagcctgccgggtacaagttcacaggctcagggtggccagagtgacaccccaaaggcagtgctctgtcctggtgctccaggccagggtcccagctgtgtgcagggccaaggcagagcccgcccacccccatccagcctgtgtttgtctcttttgaacattctagactgtcaaggagccaccacctgtgcagaagccagaaaaggtaagttgcagttctggtcccgatattgtcacatcccaaggagcccactgaccttcaccaagagtgccatgaagcctgcgccccatgatctccatctgcttgagcagagaagttgacagaggggcagaatggagcctgagaagatgggggactcacagtgatgtccccagcatgccctttccgctccctgcaccccttaacataagccttgtcaccagttcgcagcctggggtggccagtttcagcaactgtgatgatctgtcctgaataaatggggctctctgtcaaggaccttttgtaagatgctaaggacagaggcgctctggaaaaggagccccgtgtttcagggacctggccctgtccccaggctctagaggcaggtgtggctccatttggcctctctggatccatgtctcctggcagggacgaggggctggctggggttagcctctcaggactgcagggctgagggatgggggagtcctggtgggcaccgagctgggaaggacaccagcccagtgagcacaggggccaggagtccgggaacaagttgtggctcacctgggtcggggacccaccccaggggccatgggcagtggtgagtagctgaggcaggaggccctgggcctgggatggggtgggaacaggcaaccctggccaagggtggcctctgcggtgctgcagagtggtctaggggaggctgcatctgcaaccaggtggatacggacagtcacctgcaaatgctgggaccattgcataacccccagggcaggcctctttcaacaagggcagccacgggagaaccaaggggacagagacaaagtcgttggcatttacgagaagagccatgtctgccaactaggaggagtttgcgtgtttttcacatgaaggaccctccactgtggtgtgggtttctttctggtcctttcattccccagacacacatctgggagtggccagcactgtgccctgccagcactgtgagcagacagttgtttttctttttttaggagccagagcaggaaaaaccaccatcaccaccaccaccgcctccgcctccaccacctccactcccgcctccgcccccagctcctgtaaacacctgccccactgtgattatttgttgctgtggatgccaaggagtgggcgggatgagaaggatagaggtgagaagggcacagtggagaggggctgtgaccccagcatgggactgtgggaggagggggcagatgggtcccactgtggagacctgggccctggaggaaggcaggctctacaggggctggactttggacacttgatgtcaagagcaaccagatgcccacctcaccctcgtgccccagtggcaggcatatatgagggctcctgtcccctgcaccaccgggtctgtccccacacattgaactccctctctagaaggatccatgtttctgtacagtggcagcttttgatgtctgaccagtccctggttcccacaggggtgcctcagctctggcagtggcccctggctttagaccacttgcctgcaggcgcatgagtcaagcaacctgagtcacaaaaggtcatgcagatcagaaaaaaaaatagaaatgaccagtcctgacacatgttctcaccaccacgaacactgcaaggatgccaggggcacctgccagcccgggcagcagaatcttcaggcagtgaggaaaagctgtcactgagtgggcttgtcgcctgctgagatgggctgacaggtgctgcagggaggggaggaggtggaggcctgaaagcgccctcacaagacacctgtgcaggagcttgagccccggagccaacacaacagccactctccctgaggaaacctccttcacgggcgggtccagggcccatcttgctgaggggaaccctgccagacagcagcaggggaccctgcacaggggtagagagggcgcctgggtggctggtgttgagggagagggaccccagagttcctacctggctctgcccctctcccccttggtcctggctctgtctgtggtcggatctcttgcttcctcctgggagggtcaggctcctctgcagcctcagtgggcatctggggaagccaggcctgtctctcctcagagtgtggggcacatgtctccagggggaggaagtcacctgccagcggcctgcactgccttgcaacacacggccctcatcccatccccaccggagcccagaaaggcctgactgcagcgccgagtggccaaggggctgcccgccgtgggtcctgggctgctttctggcctgtttttctctgccttcctcttctctcttccctggtgtcaggtacctactccctgagcagggcatggtcctctcacctgccttccccttgtgtgccccagcagcaaggctccttctccctgcccaggcccccatgctgggcccccaggcctaactcatgctccccttcaggacctctgctcagaaccacaggctcctcctgtctttggactttttatctgaatctgcccctggcgttttctcttccttcagcaaaatactgttttgttctagattccaaaactctctgtggccacagtgaccatgtccccagcacacaaggctgccaggcccctcccccagagggggatgggagctttgtctgggtgttttcctgggcacagagctgtggggggctggggagtcctgatgccttctggaggcagtgtccaagctgcatgtcttcctcatggccacgttgcttttcagggcaatctggataccttttgtgacctctctcacgcaagctgccaccaggtgccatggatgtgttgtcagagcagggaccaggtgagctagggcacagggacacagttgatggacaaaaggccactgcttttcccctgaccactgtcctctgggattggggctcagagagccatgtcaggcatctgcaaaagaggacggcacaagacacacagaaacggtgcccatgggcatcccagccagtttctggacatggcatcaaagctcttcctttgttcatcacctggggccaggagtgctggctaggatggctaacagagttgttgggcaacagtgactggttctaacagggaataaggattccttccttggttcattgccttgggaccatagggaggaccaaatttttaagattttctctttgtaacttattatgaatgaagactaataattatataattattaatgaggcctcagtaatgtacgcagtcctcccatgggccatttgttaggctaagccatgctttcactgtttttatcctcccagtaactgtaccagtaggtgctattattatccagtttggtgaaggggacaaaagtgctgagatattaagtagcatgtccctgctcctaaagcccacgagtgatagggctggatgtgaactgggctgactcctgcccttactctgcactgctctccttttggatcagcaccaaggggcttctctgcttaggccctggggccctggagagccctgcttctggctcggcctgggactcatctgcctgtgcctcccacagtccagccctttgcacctggaagatgatttcatcaccagggtttatagagggacctgcactggccagacctcctgcatcaggccagcataggttctcagtggccaggtggctgtgcatggacaaggccttgcaggctgcaagcctctggatgctgctgataagaaatgggccgggagcccctgggaggcgtgctgacacctggcagggcactgctggtgtcagaggcatgcagggctcctccagccgctgggctcctggctctgtgcctctgcacagggctctcaatcccagccatgcttgcacagaagcccactttccatccgaggtcccataaggcctctccacgttgctacagcccagttccggtcacatggcactagtccagccttatgcactgaacaggtgagacacttaggagggatagagcttgacggccgagtgtgaaaacaggcacctcaagcagaggaaaggcaagaggtgggaaggttggcgtgggaaagggccagaaatggccttactgtccagtgtggtgagacaggggatggagcaagtcgctgaaattgtctcattcccaagggcagctctttgaagctaaggtttaggggtggggtggtggggggcagagtaattgcattacagagggcacttaccactgctcagggctctgccaggcccttgccactgtcatcatgtgaagtccaccttgcgattcttggaaaaggagagacaatccctgttttactaatggcaaaatagaggcccagagtggcccagagagttgcctaaggccacccagatagtaagtggctgcctccaggctatcagaaatcaaccccagatctgtccctaacccagggaggcccatagctgtggcttgtagacctaggctcctttctagctcttctgcgacaacctaatttgaccttgtgcttcccaactatagtcctgaacacccgactgagtgtcttgtaagatttctgtcggatacccaagaattcagacaatctggcaggagttccccgttctcctctttaagccttcggtgtgctggccctagggtctaacatgaatcatgcactaaagaggatgcatccccttaagaccttcagcccgtttcagagccacagggtcagactgtaagcctagtcatgagtgtacagagccagacaccagccaggctgctggtgagctcagcagcttcctgctcagagacactgggaatgtgaccttcctgcctgagccaggggtccctgagtgagaagcagccctgaggctggaggagagagagtgcatctcagtgagaacccgctggagaccaggcttggatgggtggctcggccccagccaggcagcccaactgcaaccgcacggctgtggaggcatcagtgagacgtcctgccaggacaggcataggctgtctgtctcttcactgcagagtgaagaggccacctgtgtgctgcacacccctcttccaggatctcccctcagacagggattcactcaggccctcagcaggttgggggatcctgacagaaccagtgcatgcctctttctccacccatgcccggccttgtgaggaggctatttccaaactcttcttcctgacttggcattgtgggctgacctggggagtgtgataagctcgggaagttgatgagcctgtttgactggaatgtgctgtcgaatttagaggagctgctgccttttaaaaccttgtttagtttattgtttcagcaaatccaaacatttttgcattttggcacataataatgcaggaaattctccaaggctcagtttaccaaaaacctcagcatttttgtggcaaaagcagtcagtcttgtttaatttcaatttttgttttaaattgagtgtgtctccctgctccatcaccttcagttccctgaataaattttttgatagtgtcctcttccaggccatccccactacacacttatacaaaatgaagcagcacaactccgagtctcttgagccaaactctacctcccatccatgctgaggattctccttcaccttatcctgtggatactcattatgttaatgggaaacaatatcactcgatccatcaggaaagtcaggctaatagtgtgaaaccttactctctgtcaccaaatatagtgcccacaatgatataacagcctttccagtgagtttaattcgtgtgcgcaccacagcaggaggccctttagaaactggatctcatttcattctcacaacacccaggaaggctcatagctgccattcatatagatcttaaggtgggccagacactgttgcaactacattccacaaactaatatatgccataactctattgtggggaggaagctagaggccctacaaagttaggtaacccacccagggtcacacagccaggaagcaataggaccagcatccaacaacctggctccaggtccttactgtgtgcatggccacctctctgtcctgcaaggtagtcactactgtctgcatttcagagctgtggacaccgaagctctgatgtttagtgatgggctcaacatggcagggttgttgagtggtagagccgggttatgaactgacctgaggggaggctcatgtctgagtcaggttccaccccatgtcctgctgtcagagtgatctatggaacacctgcaagtgcatctctctacagtgcaaaatgtcacacggcaggtcctcaaataacgtttcattcaacgtcatctgaacaccgagtgagaaatgatgatgctgatcagaaaaaaatccattcccagctgaggccaatgtctgtgtggagtttgcatgttgttgctatggctgcagggaatttttctgggtacttcagtttctgcttacatcccagagatgtgcacatcaggtggattggcgtgtctctatgggtgctgtgtgagtgtgtgggcatgtgagtgcacactgcaaggacatgacatcctgtccagggttagttcccaccttgcaccctgagctgctgggataggctccagcctcctgcgaccctaagctggaataactgagtaaataattatgttatttgcttttattaacttttcttaaaggtgtgtatagctcacatttatttcaatgtttaatattagaagcattttggtttttatttagaagtttgatgatgccttcatgactagatatatgccacaggaccttaatttactaatatcaattaatctatgatccagtctgttttcttgtacactgtttcactggaagtcatgatttccaagaaactatcaacagcttctaatgagaatttactgaaatttacacatgatacatttgtgaatattaatatcttgatttcacactgtcacttgcagacctccttctaaattcgtactcatgtttgctgggatagttgttctgggtaacaattggagcttaatgcagacgggccttaggatgcattcatgaccatggagctcctgagttctcctcctggccatatgcccgtggagggcactagaccaagggacaggggtggcaaagccaggctggctgtggcctccaactgtccaggaatcccagcttgcagctgttcttgaagccagtgctttttgggaaagtttcagatcataactttggtattgcaattacagagagccttcccttcgactcctcagcaccacccctccaaccccaaaacacatgcacacacacacacacacatttctgtaacataatcgggaaatacaaagattgagccaaaactccaaagcactggcaattaaggtttctgattgtttgccaatcacttcaggaaatgtccctttaccttagagtggttgagctgatgtgagaagtaattagttgctggcttagatatctgcaatcagtagagaggcagtgaggaaggagaccctctcaaactccaggaacctcctcaccaccttacacttaccccacagattcagggggcagccacctggaggtctcctctactgtgaggcaccccaaccctgctcctcttcatcagtgcaagtgtagacccatacctcagagctccctggatctcctgggatagactggggcagaggaggggaggtggcctcagtgttagtgcccggggtcctgctccggaggatccctcagcagtgggtaaacactaggtctggaatgattgtggtaagtttttactggaatgttttgcaataaataagtagaaacaaaggaggtggaaataaacatgaaagattcctttctctttacaatagcaataaaaaacaaaatacccatatataagtgtaacacaaatatgctgacccatgatgaaaagaaactataaaactttacttattggtacaagagaaatttgaaaatataagaatctagagcacaatgtcaacttttcccagaggaattcatgagcttgctatgttattttagtgaaaattgtaatgaaacatttttagggaatttgatcaaaacgacaagttcactcgaaaaaaatagacagttaagaatcattaagaaatttttaatacagaaaagcagtgagagaagacttgccttatccaatgttaaacattaagctccaaaaattaaaataatgaaaaacaagaggctgacaaaataatggccccaaatcgagcaaacaataaatagagtatataattgtggtgatagcccctggtactgacagtgtgtatgcaggtgagctcaagtgcacttatggatgtttaaggattgtttaacatatgtcaaaagaaaaacatcaggcaaattaaatgtaacggagttgaattgagcagaaaaaacaaaacatgattccaaatagggcagccctcagaatcaggacagactcagagagtttccagggctaccacagggtcagataagattttggaacagaaaagggaaaacgacatagagaaaacggaactgaggtacagaaacagctgaattggcaacagctctgtgtgtcctcatttcaacagttggctgctgtgagtggctgaagtgtggctgctgtgaatggccaaggctcagctcccattatagaagtatactccgcagttgggttttcagtttgtttatgtactgagttaggctgtggttcatatgtgagaactcaagtatgtgagtatggaggctttctcaggccaaaatttagttttatttaacaatttcactcttttcagtggcctctcaatttggggaggttgaccaaaactttgggcattgatgccactctctgtcaccatcaaaaatgagttacttgatctcagtatggaattcacaagtcacaacatcatgccacttcaatacttttgtatgctcttgctgacttagtagaagtgagaccacttatgctcaatggatggttgcatacaacacatcgaagattttagagggttcagtggaccacggggactattaggatgactacaaagaggatgatatcaaaagaccaaagtgaactccttaacaatgtttcttatgaagcatactgacccaaatcaatcaagtcaaggttcaggcagtctaggcagctcaacagtgtttaagttgattagtcatagtctttgttcagggtgtacaggccataattcactgtaaaatggcctgatttgtagaggcattcatctttgttgttagcctggtaacacaagcatgatagcctggaaagtcgctagaataaatataaagattagaaaacccaagtttgtcatccaccatttaggatgcctgcaaaccaactgtcagttgctcccataaacacattatgtgttcctttctcttgagagattttcttaatgtatttggtggcagagtctaagaaaacagtaataccagccagccaccttttaaattaaactttctgtagtaacaaaatcagaggagagataggtgtaacattcacttgtgttcaataccaaacacaagccctcaactgtagcaaaaaggagatgtgaagctgcatgatgttccatgtgaatgtatatgtcatcacctctcttttggagtatggcttttactcatggttcacatctggctatttgatatggctaactcctgcctttcaaataccttcccatgaaagttcccatgataggtcctgtgatcagaagcaaaaacagtcaataactgaagttagcaccaactttgaaacagacaaagagaagctagtttctactgagtaaagatttcagttggtttcctgggggctcactcttgctggtagtggggaacccactgtatgaaatttagagctaatcattaaattgggaaaattcttaaattttgtagccagacagacctcccaggagttcagcataatggaataagcacattctctactgacccaatataggcccttaggggttggagaagtgtccatttagttgtatttgagcaagggtttgttacaattgttcacccatggccgggtgcagtgactcactcctgtaatcccaacactttgggaggcctaggtgggcatattgcttgagtccaggagtttgagaccagcctggccaacatggcaaaaccccatctctactaaaaatacaaaaattatctgggtgtggtggcacatgcctgtaattccagcttcttgggagactgaggcatgagaattacttgaacccaggaggcagaggttgcagtgaaccaagatcatgccactgcactccagcatggggtacacagggagtctttgtctcaaaaaaaaaattgtttgcccatcagtctgcataaaaggaagtttgcttttttgtacctcccttataatatgttgtaaaggtatataaccacatttagtttttaaaaagtaccctactgaatttaatctggtgacattatacaagcaattacttgtacccacgtagataattcccaggtcttgagagactagtgcctggaagccaaatataccttttgcaggtatcacttgaataggttttgtatatttggtaacaatcaggttattaattggaaatgttagagtgttgtttctagcaagtgcaggaaagaaagtagcaattatgtttagtgtatcaaggacaactttccactcatcctttggagtttcaaggtgattctctttgggaacgtagacactggcattaatggaattgtttcttcatttttttggttttagcccacaaacccaattgctcgggttttatgctggagcagaagcttgagctaaagccatccactgattatggtcccatgaattttcctgtagagaaaaggaaaggattaggacagcaggagatgaggggaaaagacaaaaacttaagttttccatgatgtcagagaaatcttaatttatgatctttgaaaagttgtccatttctaggatgttgtctgcttctggggagaaatttctctcatcaggtttacctgaaagtctgcaatatatatacagtcccaagagtctgaaggggcctttctgagttgtgaaatgcagacccaaggtccaaggccctgaagcctcactgcagtgtgggtggtgacaaggactcggtatggtcccttccaatgaggttcaaagcaattttcctctgacataatttccagaagacccaagctacagattctacaccatgaaaggtttgattatcctcagtcagtgcatcataaaaagcttcctttacctggtgagaatacactttgacataatgcattaaagccttccaagtttaagcatatcagagtttaggagagtgggagaggcatgcggttctgttactaggggcatatgctttccagtgactatttcgtaaggtatcaacttatgttttccagtaggagcgtatctgattatcatcaaagccaatgatagtacctttggccaaggcaacccaattgactcagttaactttgtcaatttgagttttaagatgtcatttgttctttcaacttttccagaagacagagggctaaggacaatgatagtgccatcatgtccataatatcttaagtgctttataacttgcacagtaaaatgagtttccttattgctggagatttctccagcgagtcgccagaaggaaacacattttctgataatttcttggctattgtcattgaatcagctttcccacatgggaaagcctttactcaaccagaaaacatacaaactgctacagggacatactgataccccgttgaggttggcaactgaaggaagtccatctgtaagtgtccaaaaggaaggtggatcacaaggtcaggagtttgagaccagcctggccatatggtgaaaccccatctccattaaaaatataaaaaattagccaggtgtggtggcgtatgcctgtagtcccagctacttgggaggctgaggcaggagaatcacttgaacctgggaggcagaggttgcagtgagccgagattgcaccactgcactccagcctgggtgacaaagtgagactccatctcaaaaaaaaaaaaaaaagaaattgcccatcaagtggtgaaaatatactacctgaagtttttattgttttcccaggattatgagtttgataaaccaaacattgattataaaccattttagcaactttgaaacagtcatcccaccagtatttcttcataacatggattctgtttcaggacaagttgtgggatgcagagcttttaatagtagaagcttcaaagactcaggaagggccaggcagccatctgagccctctgtgagtctatgcttaacattgaatttacatcctttagataccaaatttgtttttccaaatcaagtgcattgcagtgtttactgagtaggtcatcatgagagaattgacttggatcaatcttatggagttaatttaaatcgtatatcctaatagtttcagcactagctgatttggcataaataccttctagagcattccttttatattcaggttcagttttacaggtatgagcttcaatcttaataatggccatctctgatggtaaccaggtagcagaaaggagtttatctatttggagtccgtttatttaatgaggatcccactagaagtaagaaaccctttgttgtttccataaatgccaaaattgtgtactactccaaaagtatgtcttctatttgtgtaaatatttactgacttgtccttagctataggacagacttgggtgagagcaaaaagcctgtggtttgagctgacttaagttgaggaagaattccctcctctattagctcattttgggtggtaatggcatatcctgcctgatattttcttttgagtttttggcataggacctatgaacaaaaaaataataactcaggattagccaatgtactgtctcgtaaattaacgcaagaggccactatttccaatactgcacttacacaattgtggtcatcaccagagtcaggaagagttaatacaatagcagcgttaagtaggttgcagcattttagatggagattagaagacatcgggaagaatttcataagatgctagatggcttgctgaaaaatgctgtgtttggttgaaacttaatagacttttcacagcatgttggacttgtgaattgagttcattccctaaaacaagctcggatgaagcttccaacttggctgctgctacatctgcttttaaatgattagaatattccctaactactgggtctaattgcagactggaatatgcagtgggcctatgtttcccccatgttcttgagtaggaacttctaatacctgattgttgtgttcatgaacaaccaaggtaaaaggtttagtgtagtttggaagtcctaaagctggaggctgtcataaggccagtttcatggttaaaagcctggactgtctttccgaggtaaagattcccatactgcatttctagtgagctaaaacaatggtgaggcaattaagggaaaatttgcaacccaggatcctcaatatcctgtgagtccaagaaaacctcttaaatgtcttttggttccaggccaaggaaaatgttgaatagttttgaattctcccaggtgaaagggaaatcccttcagcagtcaagtcatgtcccaaatagtgaaatatttctcttgaaaattgaagtttttccatcaaggccttgtgacctttatgtgtgagttgctatagaaggtaaattgagccaatttcagagcactgttgagtgggagagcataacaggtaatctacatactgagtaacagtagaatgtccagaagactgtagggttattaagtactgaggcaatgcctgggaaaaatagaaaaggccaggtgtactgctgatttttctgagtaaaagcaaacaaatgttgactctctttatgaaccggaatgttaaagaaggctgagcagaggtctattaccatgaaccactttaaatcagtgggtacgttaggtaataaagtatttgaattttggactatgggaaatcttggtattataatcttattaattagctgtagatcttgaacaaatcttcaacctcatccatttggctttttaactggtaggatggaagtgttaacaaggactggtacatggaattctaaatcctagtttagttaaatctcctacaattgttgagagccctttaatttcattaggttttagcgtatattggagtaatttaggaaagacttagaataaccagtttggacctttatagacgccgcacttttaattatttctgtatcatttgaggaagagacccataaatattcaggtgttttagaaaggtgtttcattatgggcctgagttttgatcttatcgatttgtctgtagagagcataaccattctggttcaggagagtcaggaaactctacgattgcttctccctctgaggagaattgtatgtgtcctttcaactctgaaagtcctaccctggcaagtttactggatcactgttacatagtagaaaggtatattttcttgcaaatatcctcaagttgattaggcgggttcagatatggaagcctcttgaacttgattcaaaaccctcaccacagagatgatcctttcacgccaagagatttgttggctttttaaagtagggtttatgctggataaggcgaccctggtatacaccagcattgcacaggattcccagcttacatcttgtttttctatgtttatttaagggtgttttggggagagtttactagagaatccctgagccctgtctatgtttattattctgagcattaaaatctcttgggtcccctctagtggtgaaccagtccagcctaaagggaggagccttggtggtagactgagacaaaagtcaacaatctcctttcccagtgtcctgggtgtttgcaatgaaggcatctaccttggggtaaggaattccttattctgcacctcttgcttgtgatttaaaataaaaatgagaaggtccctttggtcttggcccctgtaactggtgtaattggagaggcataagattgttagccttttgggttttttcttgctctagagtcttctcaaaatgttcagctaaggccaccaattcagtcatgtctgtaactttccatcctggcttatgggttttaattgaactgccaagttcaggacggagctcatttgtaaatacagcagttaatgccattccagtctctgaaggaaatactccttgctatattttgagcacaaaatatttcagaaacagtgtttctaagcaagttctgtaatctgaaactggttcctcctgctttggtctgcagggttggatgatgcaccaatcaattttttctggaacaatcttaggaactgaatgtaaaatgtgttcagcattttctctagctccttttacctcttctcatgcaggggtttttgagggtctttaatatcctcctcaggtccaccccattctgctgctgccatccatttcttagcttcaccaggccccaatattatgtgaataaattggttaaggtcagggagccattcgaaattcctcagtaaacccttgagccttcacccttgggttagggaagtcctttacagtggctctaagctcagttttaggccatggagtaaaggtatttatcacaggaaggcctggctgatcagaaggtctttctttgtaaggcatctgggttttttttttttttcatcttcatgctaaaagggttatttattaaaaatgttagtggactcatagtatgtgagtagagatggataaaaagaggaatagctgtgagtagagatggataaaaggaaggaacaggggctgggcagggtgactcacccctgccctcacccagcactggtgttagggatgatggaaggcagggagaaatgagtggacagcagtcagcaggcccctgagccccacagctggcacttcctcctcccacaaaaatgaacggaggcagcccctcacaacatccccacagatccctcaggctgggtggcagtgccaggaggaggggccaactccttctgggagtggcattatcctttctggttcccgccatgccttctaaccatgccagaagagggtttgagcacaatggccttggctgcccctagggattgctcagaggaaaaaaggttgggggctgaggcctgagtggacagaggagagcactgaccagaagccaagatcttgcctgggccttatagtctgggtggtgcccaggaggagtgaggtggggcttcaagcccccatgacaaagccacctctgtgaggcctggactgtggtccagcacatcctgatggagtgacctgcactctgggtccagtcggcttgtggtcaggagggcagtggtgggtggaatacagtgctgaaccttcttgagccccaaggaaacgtggagaaaacatccgtgttcctccaggtggaggtctgggccaagcccatagactctctggtcgctcttgctctgggtacggccttgagctttgtgtgtgacctggggcaggcagggtgagggtgctgttatgtgaagggaccccaactctgtgctgcaaggagagagacaggctgtctggagaaagagaaagagattcagctctagtgctctggggctttgggaccaggatgctccccttcaaggaaggcagcttgtcagaggcagcaccagagctgaggctcaggatggctgggcttgggcgtgcaacatggagaggtgaggagcagagccctcaagaggagcgagggagggtgccagggcatggccagctcttctagtagctgggctgtgattgcctgaaggcagggtatggagaccccaggaacctggcaggggacggtctggcgtgcaggctgggtggagggactggatcctgccagcagtgcagagcttctctggagggtgtgagctgggagggaagatggtcctgggaggactagatttggggatgggtggagtcagggagagcaggctaacacacttggattgtactaagaaggaagcctgaatccctgaacaggtggcaggagcccaatcgggcatgaaggagggtggacaggcagctgcagacacaggtggctcaggacagggtctgagggggcacaaggggaaagtcagcatcatcctggatggggactagcagggcaggggcaggagagggcaggtcacaggacggggcctagatgggagaagggcccctctcagtaagagagagaccatctctgtaggggaatccagcatttgaggcatttgtcactcacatgcccaaggggaggctttctgcatgaatgacaggttcaagcaagctcaaagtctgcatggtctgtggaacacctgtgaggaatggagcgtttccttgggaccatcaggctgagactggcctggcaggagacccctgggattccaggcagccgggaagggtggccttgagtacagaaggagcagaacaggccccacgccagggaaaccacaagcattgatgggctgctgctcctgccctggtatgtgggcatcatcagcgccacatcacagatggggaggtcgaggcaaagtagcatatgcccactggcatcctgggatcctgctgcagccctccagccacaggtgctgaaggggatgcagttacagtcctcatgcttgcagagcagggacaggcacatctagaaggacagggcacttcccacaatgggctcagctttctgccaggacatgactggaaataccaagcagggtggtcactttagctgggagcaaggataaggggcttcctggaggaggccactctggagctgagtctgaaaaggtgagcagcagttcactgggcagacaaggttaggaagaacattcctgaaacagaggacagcctatacaaattgagaaatgggagagctgagcagctctgagaaagattgttatctaattgcctgcctgctaagccccaagagaacagccttggggaaacctaacaattctccttgaaaaggccaggctttcaatttgctttcatgcttataagatggcttctggagctccagccatcacactcatattacaggcaggaagaagaaggaaaaagggaaagcagccttctttaaagcaatgtccaacaattcctatttatactccattgccagaatgcattcacatggccatgttgctcagcaagggagactgggaaaaggtcattttacaactgagcacattgcctctctctttttttttttaattttaagttccgggatacatgtgcaggatgtgcaggtttgttacatcggtaaatatgtgccgtggtggtttgttgcaccacattgcctttcttaacaaaagcaggcttcgttagtaaggaagacaggaagaatggacttggggtgaccaatctgtgtttggtattgctgggcccatttaagagatgggaaagccattcccaagaggttgagtgacttgcctgaggtcagaggctagattgaaccccagtccctttgaccttacttatagtgaccctgagggcctttttgaaaggccctgatcaagtcttcagacagggttgccccgatcatgagcataagaagccagcagagagaaaggcatcacagatgaacacaaagacaatctctgtgtggcttgcagctgtgtgggtggtgcctggctacactagtgtgtgcccaagatgaaagcaaagcagctgcttctgcaaaacagagtttgctcttcctacgggtctggatcatcctcttcccaaaccaagggaaccgtggagctgctgccttctcagctcatcacccacccaagggtccctggagccagccttgagggctgtggtgagcactcatcccttccacatgctcactagagccttctgtgccatgctggggcacagaggtaattggggcctcctcctagctaccagggggaagcaaacaatttcgactggagggctgagggagtccagagtcagagacccaaggctgcctggagaggaagaggggactttgaacgctggagctgagtctggaaggaggagtccaggctggaggcagcaccaaggggagagaggaggagcacagcaaggcccaccctgtgggtcccgatgggtcctggccccatccctttgagccaggcaaccgcagccttctgagcccagttcgaatgccatcacggtgaccttctctctcttctcttccctacaggggaggtacctcagcttagcccttgcacagtcccaatatgcacaggctccctgctgcccaaggatctgctttccacacagccaggagtgcctttccctaccacaggctccctgcagcccaaggatgtgcctgagacacagccgggagtgcctcgccctcaaacaggctcgctgcagcccaaacatctgcctgagacacagccaacacagcagggagtgccttgcccgcaaacaggctccctgcagcccaaggatctgcctgagacacagcccggagtacttttcccaagcacagactctgtgcaacccaaagagctgccttcaacccagccgggagtgcctccccctcacctgctcctccaggtgccgcctccccccagctaggtgcttgaggcctccctccaggatgctgccgctgctgtccccactgctcaggcacacggcagaaccccctttgtcactccccccgtcagagcccaacttctaaggcaccaaacacccaagattaacaggcttttgttgctgaactggacatatacattgagtcttttcttgcggtcaaaggagttgaattcttgctgatcaactaaagttgattgtgtttgacaccagggagcttgtcttttgagtgagctggatttatactgcacctgccacgacacagtgccctggtgccgtcgggatgccaggcatggatgcattccactcccaacagccccgaattcatctgtcatcaagggctgggacacatgaggtcttaggccaaattctccatttaaaaagctcaaaaagtgtttgaaatatgaattcaatactgtgtatccctgcctagctttttgttgttgttattgttgttgttgttattgtttgagacagagtctcgctctgtcgcccaggcccaggctgggtgcaatggtgtgatctcaactcacggaaaactccacgttctgggttcaagtgattctcctgcctcagcctcccgagtagttgggattacaggagcctgccaccatgcctggctaatttttgtatttttagtaaaaatggggtttcaccatgttggtcaggctggtctcaaattcctgacctcaggtgatccacccacctcggcctcccaaagtgttgggattacaggcgtgagccacagcacccggcccctccctagctttttgaaaggaaaaatacttgcatatctcacttcctgtactcatcttcttgtccctggtttccattttttggctactcaaattctgaatgtgtcccagaaggcagtgaggccctttctggaaatgctaattatcttcccagataccccacaccatccccaagaccaggcaaatttcagggaatcctcctcatttcacgagaaaaggtaaacttccctccttaatcatttgtccccatagaagaaaccacagccccaacagagatgagtgtcaacaggcagtgtcccaccgcccactgtggcacatggtggctgcatgactgcccaaggtgccacccacacaggccatgggcaccccacatggggctcctgagcaagtcaggagaggggagctatggctgaggttgtccagtcatccctaatccatctttgagagtaaataaacggctctccacctcccccatctactggaatgcaatattgatgcttttccacagaaattctgaaagacaagtacaagttaaaaatataccagatttggattttaaacagtattgactaatttgacagtgataaccacactgtcccccctcccatgtttgtttgttcgtttctttgttttaaggcttcaacgcaatgtcttgcctctgtgtgtagggctttggggggctttctctaggtcacatgactttaaccttcagtgccatcatcctgaggagttactttttcttgtcccccttctccgtcttgcaccctcctgtcctgctgcagcctggactctgcatctgggtcctgccagctgccatgatgggaagcctgcctctcccacccttccccagcctctcccctctgtgtctgcacatctatctcccaagctggttatgagaggctcttccaggcacacaatgccttgcacaaggcatccagagaaatgagccaggtcaatgttgaggaaatggaagaggatgctagagcccctgggggtggacgggacctagtcatttggtttttccccatttggaggctcattccctgagcaactgtgggtactcgagaacatgctgcccctccacacttcacttctcaacgttcttcctggaatgggaggcctggcttcatcaatttgttgtcttgctttgttttttagagagtttttgtttcacaaaacaaaacacctctggtcctgtaaatacagagatttgcacaaagaactgagcgttcccacttcattgctagacaggtggagatatttatgacaagggcacctggtgcctggtgagcaggtgcatggcctgtgtgcagcgcaatgagacagggtccagagaggtaggatgcatgcccgcaggtgtggaagggatagccagccagacagtgcaccctctggctctagactgtctggcccagctgcctaatgcctacagccacatacaaatgtgcccagggcagccaaggcaactttacaaggtgcctgggactgtgtatctctcaagactaagggagaaaatgttcactgtattcatgacaccaggaaaagtgtgggaaagctttcattaggcagaaagggagttgaaataacctgaaagtgtacagagactttatttcttctgtgttacccatgtggaaacatgaagatgttgcttcccgtccctgcaactctgagaccccataggaagaaatgtatgtgcaatttcatgaagagctttatgtgatcctggggaaatcaacatacttgtttgttaagggggattgagagcctttggagtttagccaatatgaactcaagctagggcctgtcatccttcctcatccctcaagggaggaagtcatatattaagaaggtgagctcagaagtcatcacagaggaggactccactgccctggccacccacagggaccctcacaggctttctgtgttggacagtgatagcagaaatagctctagtgtcatatggtcctttctcccttcttgcttttgtaggaatccaaagctaatctgtccctgatccggattgcacgcacctgtgccttttggggcctttctgcattagttcttccttctcttctaacctcaaaaatgtgttttctctgttggctctttccctttaacatagaagtatactcacgcttttgttgaatcttgaaataaaaggcttcctttaccacatatctccctttaatactacatctctcttctcagccaaatacttgggaagagaagccctgagtttgtgtcattgttttctcacctccagttcactactttgcccactgcctgacatccagctcgctcacacacacacccaagcccaatcactaagttgccatagctaatttgtagctttcctgccttcctggcaaaatttgactctgcattgggataatacatgtcgagtacctattgaacaggcactgtgctaggtgctactgttatagatatgaaaagaaggcatcatctcctttctaacaactcacaggagcagccattcctgattcatacatgtctcttgactcccagtgctcacttttgcaagcttcacttaatgccgtgcaaatcaccctattctccaggtcttctttcttcccagttctccttactatacacagcttctcaaggcagtcacctccacactcatggcttcaattgctttctccattctctgagaacaatagaattttaaatggttttatttcatgtattagctttattttatacaaggtgcctcacctgctgtaaccatagattcaaagttgctccatgaaagtaataaatgaaaaatggtgattttttagcatgtaaattttaggaaatttccccagttacacttaatggcttgatttagtgtgtatgttatttttgaaaacatatgttgggatgtcacaaatggacttagcctacagagatttatattcaacttttgaccagagagttccattttaatgtgacactgagagtaaaaaactatcttttcctccttacctatttctcttcctacattctcggccaggaggaaggcactgctacatacccagtcttccccagcagagcctgagcagctctgttttccttctacttcccctcttctttcacatctcatgaccaagcacttcctattctgtctcccaaatgatcacagactttttcctccacttttgtcactgccactgcccttagcattactctgcctttagagaaagtctcttaattggtttggttgcttccttcagtctttattatacagaccactacacgcacatctgacagagacttttcacctttttatggttgaatgactgaaattcccagaataaaattaaaaccaccccagcatcaaatttgaggtcaaatagaggtgggtttgtatcccaggttcatatactgtccagcagtatggtctcagaaaactgacctccttaagcctttgtttgtgtatctgcctacactcattgagagttgggactatttcacacatatagtgcctggcatgtagaagggacttaatcaatgttgaaagaaggggaggcattttaaaatccacatcaaaaaaatgttgttctgttcgggagtggtggctcacgcctgcaatcccagcactttgggaggccaaggcaggtggatcacctgaggtcaggagttcgagatcaacctgagcaacatggtgaaaccccatctctactaaaaatacaaacattagctgagcatgggggcgggatcctgtaatcccagctacttgggaggcttaggcacttgaatgagaatcacttggacccaggaggtggaggttgcagtgagcaatgattgtgccactacctgggcaacagagtgagactctgtctcaaaaaaaaaataaaaagtaaaaaaaattcttttaaaaatatacgaatctggctgggcacgatggctcattcctgtagtcctagcactttgggaggctgaggcgggcctgaccaacatggagaaaccccgtctctactaaaaatacaaaattagccgggcatggtgacgcatgcctgcaatcccagctactcgggaggctgaggcaggagaatcgcttgagcccgggaggcggaggttgcagtgagccaagatcaggccattgcactccagcctgggcaacaagaacgaaactccgtctcaaaaaaaaaaaaaaaaaaaatagtgttcagcaaggttgaagcataaaaggttaatagccagaatcatttatcaattgtatttctatacatctacaagacacaatctgaaaatgaaattagagaaacaatttcactgggcaacaagagcaaaacttcatctcaaaataataataataataataataataataataataaataataatctacaatgtcatttcccatccaagcctgacttctacctttactttctgatatggttttgccatgcccccacccaaatctcatcatgaattataatccccataatcccgatgtgtcgagggaggggcctagggggaggtgattggatcacaggggcagttatcctcatgctgttcttgtgatattcagtaagtcctcatgagatcttatagggttttgttttgttttgtttcttgggatggagtcttgctctgttgtccaggcaggagtgccatggcacgatcttggctcactgcagtctctgcctcttgagttccagtgattctcctgcctcagcctcctgagtagctgggattacaggcatgcaccaccacacccagctaatttttgtatttttagtagagacaggatttcactacattagctaggctggtctcaaactcctgacctcagttgatccacctgccttggcctcccaaagtactagggttacaagtgtgagccaccgtgcccagctgagatctgatggttttatacatgtttgacagttgctccttcacatgttcccactctctgtgcggccaccatgtaagtcggacctgcccttctgccatgattgtaactttcctgaaggacttccccctctgccatgattgttaagtttcctgaggcctccccagccatgtgaaactgagtcaattaaacctctttcctttaaaaattacccaacctcaggtatttctttatatcagtgtgaaaacagactgctatactttctgatactcatgcttaagcaattggggaattcagactacctgggatcaaactatggccccacccttagcagtcatgtgaccttgggggggggttacttaccttctccgtctcaacaacttctgtaaaatctgtaacatgagattgtttctgagggttaaatgagcatagcacagtggggacactgtcaggcacacactacttgccagatgtcgagtattcatctttattgaactaggactgtggtaagccactttatggctctcgattttgtatgagaaaatcatgcttagtgccttgttagtaaaagaaagaaaatctgaaagtccctgccacggaaggaagaaatagcggggagaaaagggagttggtaagtttcagcatttcagagcttggaggggcaagttaggtttctattttatggagaaggaggtggaggcaggatgggtcctaaggtgtcattcaaaacacacagccataactctttattgagagtagagctagggccccagggattgctgtggtcaagttgcggacaaaaatgaccactcgttggaagacaggagaggagtgtttagttacaaaagcagtcaacaattcaggtgtatctatattcagacagcaaataaaagttgttcaacttggttgctaatgggacccactctactgaggctttgtgtagaactcgtagaggaagctggcttcgaggaatgaactaccctgtgcttttcttaggactaaaatctcaggaagctggtgatgaatgaaaaccttagtcccactggcactgcacgaggggccaggagagcagcagcatcataagccacagggtggggcagccaaggcaggggcattctgagctgttggggaggggtggcaggcagggtggggcactgtgagctgtcggggagggcattgtgaagtgtggggtggggcattgtgtgccacatgcctgggctcccacctggggccagtgggcttcagtctgtaggtgactacagaaggaggaggagctccgtctgttctctcttcaggcagttgttgtgtctctcagcgcttgttgggttcacaacctaataaataagccggctggtcttcaccctcccagacaagtcaactcaggggaggcagcagggtgcgggccttggcccgcagccctagccggggccggggccggggccggggccagggctggtgcccggggccgcactgtgaggtgggcaggcgaggagcgggaagaccatctctgcaagtgcagcatagcctcggcctaggacagcgggagtgcgtggccaaagctgtgagcagaggcacaggtggtggcagacagtagaggcgccccatggggaacatactgacctgtcgtgtgcaccctagcgtcagcctcgagtttgaccagcagcaggggtcggtgtgtccctctgaatctgagatctatgaggcaggagctaaggacaggatggcaggagcgcccatggctgctgctgtacagcctgctgaggtgactgttgaagttggtgaggacctccacatgcaccacgttcgtgaccgggagatgcctgaaggtaaggaggtgataggtgccatctaccctcggtttgcctctggctgctgctgtccccaaggttccctttgaggcatcccccacttcgagctcctttctgcttgtagccagctttcccgggggctggccaggaacaaaagctggctctgccttgaattcccaccccttagtctttccccaccgagtccagtcagtttcttttcacctcccctcccaatcgcccagttcttgctctctcatctcattctcccaggctggcatgggaccatttatttatggctcttgtcgaataagcagcagttgaataaatgagttgataaatttttataaatgattacgtcctttttcttttctccctctatacatatagctttggagtttaacctttctgccaatccagaggcaagcacaatattacagaggaactctcaaacagatggtgagacaacagtgtctgtagctctgtttattatcctgtgggactttgtttaggcctctttgagctattctcttccttttctcaataaaaactcaaatatcccaacttttcagtacccatcttaatttttctttgaacctatccagatggtacctaagtgaaggaaccaggtaagtgcctaattgtttcctttgttaaagtagccaaatctcaggacagttcctattcaaatatttggggatttcttatttaaaatcagaatggagtttgccacgggagaggctatatggtattcttaatgggctgctttaagtcaccttgatagaagctgcttagtttcttctaactgtaatttgaacacagaaggaaaaagaaaaaaggagagtgcttaaaataattgtgaaaggtgtaaaatgtcacagccggggctgcagaaaaatggttgtgtgtgtgtgtttggggtttctcaaaggagtttacctatgaggctctgattactttaaaattcttactttaacagaaaatgtgtctccagatttattctggtgacttaacagactttatttacctccttgttctaaaagggaggtggggattggttcacggtcaaaactttcaaaagacatgaaacgtcaatgtagacttttaatgtgtaatataaagattgcaggttaaaatgtcagaccttccctgtaagagtgtttgttgccgtggctccccctttgtcccttcccctcctgacaatagcatcttgttcaaagataagaaagttacagttttggctgggcttggtggctcacgcctgtaatcccagcactttgggaggctgtggcaggcagattacctgaggtcaggagttcgagaccagcctggccaacatggtgaaacgctgtctctactaaaaaagaaaatacaaaaattagctgggcgtagtggcgcatgactgtagttccagctactcacaaggctgaggcaggagaattgcttggacctgggaggtggaggttgcagtgagcagagatcacgccaatgcactccagcctgggtgacagagcgagactccgtctcacaaaaaaaaaaggaaagaaagttggagttttttagtctctacactgtcggcagaggcaggggatgggagccggtagaaaagagaaaacaattagttggtttgcctctaaaattttgcaaagagatgaatctaagtaaaagtaattctgggtagtaatatggttcttgaataaaaactgaaattttcaaaatagaaaacattgcatcataaacatattaaatccagtaggcttattggtttcatttaaatgccagagatttcattactgtagaggaaatgtcttatagctcttctatttaaactttggtcgggctcttaatttttaaagaggtaggataattaagactcattatgagtgtgactttgtaacttggaagtactatcttcacatttcaaggtatttaaggattgctttagaataaacaaatgcattatgtgaattaattgattgtacctttatacacaaagcatgtaagtacttgtgtaaacttatactctgcttggtgatgttcggaaagcctgatggatgttacacaccagttagtagatgggtagtgttggatgagagcccaaaaatggctctttattgtcattctttaggattacagcacagtttatgtatgtctcacttggccctttccaatacaaataaggcctgtgtatgttctccctatgtattgctaatgaagaaatgaaaacttagagatatcacatgactatggaagacagctactcaagagaactaaggttctgtgtcctcagaatgaaatggaagtgacagatatgatgaatttactttttaaaaattttaaaaactctagaatacaacttatattttgcctataaaatagactgtcttttaaaacttactgccatcttgatttattttatgcaaagttgattttacacaactcaaagccaaaatttacctcttcttttttttttttttttttttttttttaaataaaggagggtgtcattgtgttactcatgctggcctcaacttcctgacctgggttcaagtgattttcccatctcagcctcctgagtagctggaactacaagcatgtgccatcttgcctggctctatcttatgtctatacattcatttcaatggataagaatcaaagtagagatagtgaaatagcctaaatgcagcagtcgaataaacgagttgataaatttttatcaatgattgcatctctttttcttttcttcctctatgcatatagctttggagtttaacccttctgccaatccagaggcaagcacaatattccagaggaactctcaaacagatggtgagacaacattgttttttccgccaagagaaagaataaaagctcttgcttgatcaggttatagaaagtatttagaaaaactcatattggtttaaatttttcaccttttcacatgttcacttgtcttattttaatatgtgatatactttcctttagttgttatgatgttagtgaaaacgtgtaacctttttgtttatacattttgccatctttttatcaacacaattaatttgtcatgtgttggaggagtcatggatttgtctttataattcttggatttatctttatttataattaatggatttatctttatttataatcccttttcccttgctccaaaaagtacactttaaagatgaatgatagaacttaggcttcagcttggttttcatttaaacaaattaaaaaacatagtcgtttatcatcagggattgaatctgtgatttgggcctcctcttacacagtcctctgaccacattcatttaccacatccaagtttacgctactcaaaagttttaggttattaactttttcatttgatataatgtaaatttaaacatgccttactcctgcttatttcccttaatgttatattaaatcctcatttatttgccaacaagccatacacagccaagttttccagttgacttaaacagcaagaacacaagtgagggttctataataatgtgcgaagtaatgcagcacagtaaaacacgggagtttgtaacctttgtttttatagtttgagtagactttgcccatcttgagtcagttatttctggttagaatttgtcttcattttttacattactataaagagatacctaaggctgggtaatttataacaaaaaacaggtttaattggctcaaagattttcaggctgtacaaacatggctttaacatctgcttctggtgagggcctcagcaaacttacaatcatgataaaaggcaaaggggaagcaggtggttccacacggtgaaagagggaggagagaggggaagggggaaggtaccacactctttttttttttttttttttgaaatggagtctcactctgttgcccagactggagtgcaatggcacaatcttggctcactacaacctccatctcccaggttcaagcaattctcctgcctcagcctcccgagtagttgggactataggtgggcaccataacacctggctaatttctgtatttttggtagagacagggtttcaccatgttagccaggctggtctgaaactcctgacctcaagtgatctacccgcttcagcctcccaaagtgctgggattacaggcttcagccaccgcacctggccagtaccacagtcttttaaattaccataatgagaatgtgcttattatcatggggatgggaccaagccattcataaggaatccactgccattacccaaacgcctcccactaggccctgtctccaacattaagggtcacatgttaacatgagacttggaggggcaacatatccaaaacatatcagaattgtatttcccagttccttccagagccatgggcttctcacacctagagagcatggaagcagtaaaagaaaagctattccatgtccctcactcttcggtggtaggaacttttgcctacaaggcccttccagcatcaaaggcagaggcagtgtaggaaacaaagcatggcccaagtccctcttggggcttttattattctggcctctttttagaggaaaaaaaatgattttttgagctgcagacaccatgtccaattaggtttgtatactcattttaacatcaaaatttaggccaggctctgtggcttacacctgtaatcccagctctttgggaggctgaggtgggtggatcacgaggttaggaggtcaagaccatcctggctaacacagtgtaactctgtctctactaaaaatacaaaaaacaattagctaggcatggtggcacgtgcctgtagtcccagctagtcaggaggctaaggctgaagaattggttgaacctgggaggcagaggttgcagtgagctgagatcccgccactgcactcgagcctaggtgacagagtgagactccatctcaaaaaaaaaaaaattaagctacgttactttccagttgtgtaaagaccgttttttaattttgatttgtttttagtgacatattagtagataaccactaagtgtggttcaagatgcttacagggattctgttgcatctagagataggtgtctggtcaggaagtagttcttagagctgttagctcttagagtctgataattaaagtaagctatgtgtaaatgcagaatgagagaatactaatggatcatggctcatatatgcaacagttaaactttttattagctaaatttttcatctggcctaatttttttacccttttcttttgtacatgaggattctttcatttgtatgtaatagaaacaaaaagtaaactaaatgaaaaactaagtttttagatttgacttatgaaattaatcatgccagataatttaaattataaattattgaaaattatttttttaaatggaattttgtctcattttacataggagtaatcagtaagatgttaacaactacttttattttatggtatttgtatcagaagtgaccagtttttttttttttattcttagttgtagaaataagaagaagcaactgtacaaaccatgtaagtaaacactcaaatagttaagaaattgatagtttgacataaaaggatgtctctcttgatttctttaaattacaatgtggacctggtggtggtagcatggacctctttttgtggattttctaaatctcttctattttcctgagtattaaatttatccagaaaagtgtttagcttagcgtgtccaccttttaaagatttctgacatttaagttaaatttcaatagtctggttcaaaagatccgccttaaggctgggcatggtggctaacgtctgtaatcacagcactttaggaggccaaggcaggctgatcatctgaggtcaggagtttgagacaaccctgaccaacatggtgaaattctgtatctactaaaaatacaaaagtagccgggtgtggtggtgcatgcctgtaatctcagctagtcaggaggctgaggcagaagaatcacttgaacccaggaggcggaggttgcagtgagacaagatcgcgccattgcactccagcctgggcgacagagcgaaactctgtctcaaaaaaaaaaaaaaaaaaaaaaagtgccttaaatatttaatcttatttttaatgaaagaacaaaaatagaatagttaagttaattgccagcactgtctattgactttctatcacagcgggtaaaagcgtaccttccccgctacaccatgatcttatgtttctccctgtgtttcttccaattgtagcacactttttaattaaatcagtaatatttacatgattatgactctgcaaatattattcactgctaagtcatatggtgttttcactgtgcctctgcattccatgtccttcatcctgtctctgaaacagttctgaaatctgagcacttctgcaattctcctggatcttcttttttcctagcctacgttagtttatctatccaaatatcgttaagtagcctctgggtgctctgtttgctttcacatccattattttttagcatgaagctaattttctgactatattcatttgcctattttctaacagctgtttttcccccaagtattgtagcatttatcacatgcctttcaaagacattttccatctgcaaaaacacatctgttcctttttatgtgtgtgtggggggcaactttctttggccttttgtcatcctagttcaatatagcgtgggtttccctagatatgctcgatgtctgcttttctgggctaactccttaaagtgttttgggatctcacgtaactgctgtcttgtgtgggatcgcctgagtcctagattctgtgtttccttctgtcctgttatcgtctctagttgtacttgaacacattttcctgggtggagatgttaaaatccctcctctttgatagagagtacacctctaggttgaatctaaattgtatggttctgaagacattttgcagttgtgctcttattacagtgttgttcttgaatctattgccagtgtgtgatatgttatttacaaccaggttttagttatctgcggaagctttttagaatctctctctctaaggttctgaaattttataacagcttgttggggatcttttcattttattgaggctactaaacctgcagactatctcttcttgagaattttttttttattttctctgttacttttttactgatagtcttgttattcagatgctaggctgcttagaccagtacacctgcattgatttttaatttttccccttgtatttttttcagtttgtctttttattctagttctgggatattctgtgactttatcctctactatttctattgaattttgtattttttgagagtgttttaagatttttttttaaagttttgctcctgattttgactggtcctatcaattccttttttctattgttttgatctctttccttggaggcttccctccaatgtgtggtggtccctggcctgctttatttggaagcaggatttctgttaactgatagcactcagtgtgaggccttagaagcctgactagcttttcatttgggagacctcagtgtattatctggggatctttattgaagacatttcagtttcttctgagaaggatctcccaattttctgcctggaaagtaaaagcaggcctggaaaggaaaagcagagttagcaaagacagttggagttccatttttggtgtacagttttctttatatctcaggtttaagccatagtatctctgagccagaaattctcaggtttgatatatccagagaacacacatctaagtttcttgtcagatggaaggacaggtggactttgggctctagttagagatttgcaactgaccttgctggcttttttttttttacattttaccctactttccaaagtgccatttgcctgtaagttcacaacctgcctttagttctgcaagacaaactggctcgcttctgttccagtcactttctgtagtcagcaaagttgtgtttctgtgttatttaccactcctttgtctactttttatgtctcagcatttactaaaaattatctctgtcaaccttctgtgctggtcatgggtgtaacctttattttatgactaatgaggcttccagagggagacgaaataaatttgtggtcaatctattatatttaatccaaatttaggacctatgtttaaatcaaagtctaatttgagtataatgatattaagccagagaattttttaaattaatgtatctataataagcatattacacttttctcctaaggccttgtttaatattttcattcaaagtttatccactgccatatgcttcccattacttcacaacataaatggagctgttttcctgaatgcccaaggtgttagaaatatttaagttaattaagatttgttcatttttagcctggtcaacataacaagacctcatgtctacaaaaaggttaaataacaaattagccaggcctggtggcatgcgcctttcgtattacctactcaggaggctgaggcagaggatcacctgagctcaggagtttgaggctgcagttaactataattgcaccactgcactccagcctgggcaacaaagggagaccctgtctcggaaaaaggaaaaaagttactaattctttaaaaacctatctaaaatttgtcctgcccaaaaggagagtgaaaaatatgaactttagtctttgtttttttttttatgtttgctgagaaaaatgctgtactttatttatttatttattatttccataggtttctgggggaacaggtggcatttggtgacatgactaagttctttagtgatgatttgtgagatttaggtgcacccatcacctgagcagtatccgctgaagccaatttgtagtcttttatccctcaccctcctcccagcctttcccccaagtccccaaagtccattgtatcattcttatggctttgcatcctcatagctcagctcccacgtatgaaagagaacatgatatttggttttccatgctgagttatttcacttagagtaatagtcttacttccacccaggttgctgggaatgccatgaatttattccttattatggctgaggtggtattcctcatatatatatatatatatatatatatatatatatatatatatatgtatgtatgtatatcacagtttctttatccgctcattgactgatgggcatttgggctggttccatatttttgtaattgtaatttgtttgagttcctcatagattctggataatagccctttgtcagatgtatagactgtgaagatttcctcccactctgtggttgtctgtatactctgctgattgttccttttcctgtacagaagctctttagttaagtctcacctatttgtttctgttgcatttgcttttgtgttcttggtcatgaagtctttgcccaagccagtatctagacgggtttttccaatgttatcttctagaacttttatggtttcaggtcatagatttatgtccttgatccatcttgagttgatttttgtgtaaggtgagagttgaggatccagtttcattctcccgcatgtggcttgccaattatcccagcaccatttgttgaatagggtttactttcttcactttatgttttaggtggctttgttgaaaatcagttggctataggtatttgagtttatttctgggttctctattctgttccattggtgtatgtgcctatttttatatcagtactgtgctattttggtgactatggccttatagtatagtttgaaatcaggtaatgtcatgcctccagatttgttgtttttgcttagttttgttttggctgtgccggttcttgtttagtccatataaatttcaggattgttttttctagttctgtgaagaaggatggtggtattttgatgggagttgcattgaatttgtagattgcttttggcagtatggtcattttcacaatattcattctacccattcatgagcatggggtgtctttccatttgtctgtgtccatgacttcattcagcaatgttttgtagttcccaacggcatatcaaaaagataatcgggccaggcacggtggctcacacctgtaatcccagcactttgggaggatgaggcggacggatcatgaggtcaggagttcgagaccagcctggccaacatggtgaaaccccatctctactaaaaatacaaaagttatccgggcgtggtggcgctcacctgtaatcccatctactcgggtggctgaggcaggagaatcgcttgaacctcggaggcagaggttgcagtgagccaagatcaccgcattgcatactccagcctgggcaacagagcgagactccatctcaaaaaataaaaaaaagataatccaccatgatcaaatgggtttcataccagggatgcggggatggattaacatacacaagtcaataaatgtgatacaccacataaacagaattaaaaacaaaaaatcacatgatcatcttaacagatgcagaaaaagcatttgacaaaatgcagcatccttttatgattaaaaccctcagcaaaatcagcatacaagggtcatagctcaatgtaataaaagccatctatgtcaaacccacaaccaacataatactgaaagggggaaaagttgaaagcattccccccgagaactggaacaagacaaggatgcccactctcaccacttgtattcaacatactactggaaggcctagccagagcaatcacacaagagaaaacaataaaaggcatgcagatcagtaaagaggaagtcaaactgttgctgtttgatgatgatatgatcatatacctaggaaaccctaaagactcctccaaaaagctcctagaaccgataaatgaattcagcaaagtttcaggagacaaaattaatgtacacaaatcagtagctctgttataccccagaagtgaccaagcttagaatcaaaccaagaactcaatcccttttctgatagctgcaaaaataaactaaaataaactaaaatacttcggaatagacctaaccaaggaggtgaaagatgtctacaaggaaaacaactttagtatttttaatgggttaaaatgagaggcagcaggtacagcagaagtcagtgcgtgggcatacgcatccaatgggtactgcacctttgatggtaaggctttggttttgacttactaaattactaggtacgattattttctagtttttgtcattaaaccttaaaactactaagtaaccccttccatttcttgttaaatattgtaaaatttcatactctcatttatgctgactgacgttagattgtttgtttctattttgtgactaccttaaataatacctataaagagtaaactgttagtagtgtttttgctgtaattaaatgtagtaagacttaccttccaaatgatgactgaattgtcaaacacttgtcgaagttttggatttactcaaaattctatgctcagcagctggaggtaggaagagtaagggccctcccttactcttatggagaggcatactttctcacgaggggaatactctgcaggaattagcatcttgtaagcagtggtgaattcaactaattagtgtataaaaatacattttttggtgtggctgccgacaaagagatccaagagggtagatggagtcgagcttgctgaagcaaggaaagagaaaagcagtattctaggcagagagcaggggtagagcaggaaaatggctaggtgcaggtcagatgatttatagaatgcaattgatcaagttttgaagtgaatgcaaagtattctccgagagtctcatttgagtcatgtcttggcagtcttatttaaacatgaagtgaaagttagattttttaagttgtcatttgtttttagggtgtgagagaatatttaagtgatactctttttatcctccacataagaaaataggactagagaaacctatggcttcctcacttgttggtggcctagcagccctggcacacagagcccctgaatctgaagcacttcttttgtaacaatatcacctgaaataatacatttaggattagtaatttagtaaatgcattagtcttgtattcactgcaataaaatgctcttgtagcaggattatttaatacactacattttatcgtagtaaataaataatagaagggctgggcgccgtggctcacgcctgtaatcccagtactttgggaggctgaggcaggcagatcgcgaggtgaggagatcgaggccatcctggctaacacggtgaaaccccgtctctactaaaaatacaaaaagttagccgggcatggtggcgggcgcctgtagtcccagctactcaggaggctgagtcaggagaatggcgtgaacccgggaggcggagcttgcagtgagccgagatcgcgccactgcactccagcctgggctacagagcgagactccgtctcaaaaataaataaataaataaataaataaattaattaattaatagaaattcttggctgctttttattgctgtagaaaaaaatatgaaatctcattttaaacttttctttcttttttttttttttttttgagacggagtctcactttgtctcccggcctggagtgcagtggcgcgaactcggctcactgtaagctctgcctcctgggttcaccccattctcctgtttcagcctctcgagtagctgggactacaggggcctgctaccacgcccggctaattttttgtatttttagtagagacggggtttcaccatgttagccaggatggtctcgatctcttgacctcgtgatctgcccgcctccacctcccaaagtgctaggattacaggtgtgagccaccgcgcccggcgaagccgacttttcccattatttttaacggtaattcataaaatccttgttaggtttgatgacaggtaccatattaagggcagcattttataacccatatcttaaacatcatctctggaagttgagagcctccaatgggttttctatagagtgcacatgataccacactcaggcagttcatggagtgtaagacatatcttagtgctttgtcatttgacattttaactgagaaaaaaatacactttgataagtttgacttacacttcccttccccttcaggtatctactgagcgtttcagtcaacaatacagctcgtgttcgacaatattccttgatgacagcacagccagccagcattatcttacaatgacaataatatcgtgagtacaactatgctgccgagggacagattcctttattcggaaattatttcagccatttggttgtcctcttcagcaatcagcttaagaaattggagtcaaccatatattgatatccagattctcaatattaagtatcagtttctcttttaatcttagacgtcgtggtggaaggaaaaatcagttagcaaagaagcaaacccagaaacagtgtatctttttgatgcctttatgcctttagacaatgttgaacacagtgagaaggataggttccctttcttgaatgttttttgtggaaacttagtttttcaatgcatcataggcccaaatcagtgtgcactactttggacattatccttggaagaaggaacagcttttcttcttctggcaccacagtgtatctgcatttgaatttctcccattgtgcatgagcacctcatgggccacaaagatgcgctttgagagcaccctgagatgaagtttattttaaaaggaacaacaaccaacaccaccaccagctccacaggggccgtccagtgtacattattctcatctccttgggttattagtcttgatttttagaacacagtttggaaagtgctaatttagaatattaatgtctttatctttaatttaacttttcattctgtaaacataactagcttataaacaattttgtttcaaatgcactagcctttttagctaattcaattgtcaataacttttacttcaattaaaagtggcaagtttacactcataataatgtcactttcctccctcccttttaacaatagttgagaggaaattgtgtttcaaacaaaaactgaactcaaactctgtctcaagtcctgagctttgggacctattgagtaatcactaaatgtctgtagtcagccaagtctcttaaatctctgagcacacatacacaaaaattactttgactagagtccctggcttcttctgagttccaaagattttgataagttagcatataattcaaaagcagctttgaagattaattttgctgaaactaatttcgtgcttttttcctcattattctactttttagaagtctacttttgagagtatagtaagttttaatttgccaccagcaagtttgagaaatgatcatttggtgtattcactattggtgaaataaagttattgaacaaattaatagggcaaattggcttcaagaagatattttgaaaaatgttttatcatgaatcagtagtgcactgttgtcagtgggataggtggaactcgctgagatcacttatgcaaggtttttttcaaaatgcaagtctgcaaatacatgtatcttcccatctccactttccctctatctctaggcactgagaagccttttaggaaaatcgggatggatgtgaggcatctttctgtgaagaaaagcatcccagaagattctgattttcaccccagctcaatcattccaaactttgctgctgattgaaatcacctgggaaacgtttaccaagaaccttgatgcccaaagccatacccaatactaattaaattaaaatgtctcatgtggaagatgaggcagatattaaagcttctcaggcgattttaatgtgcagcaaagtttgagagccactgcttaatttgagtttaggacgagaaactgctcctatttggtgggaccttgggcaagtcagttttaaggtttgtttccctgatctgtaaaacgagtgttgaattaaatgtcacataaggtcattggtcctttccagcatgtaactttaaattctgtgattttaaaattatttcagagatgaaaactacttgaagcactatagacatatccatctcacatgctaatgttacaggctttttaaaaagtgctgatattgtgtagacctattagtagaattgagatttaccttccctcagttgttttgagcctcactctacaaaattagctgggcgtggtggtacatgcctgtaatcccagccacttgggaggctgaggcaggagaatctcttgaacccgggaggcagaggttgtggtgagccgagatcacaccattgcactccagcctgggcaacaagagcgaaactccacccaccctccccccaaaaaaaaaattatctgggcatagtggcgcaaacttgtagtcccagcttcttgggaggctgaggcgtgagaatcgcttgaacctgggtggtggaggttgtgaggagtcaagatggcaccactgcagtccagtctgagcaagagagacagactctgggtcaaaaaataaataaatacataaaataaatcgcatgggatgaaaggtttcgtcggtagaaaagcatataaaagggacatctgttattatttatatattgtaatcaccaacagaaacgcgtcttctaacggcatatttccttgcattttggttctcatatttttgtaaaaaacaaagaaatgaaaacaaagtgcccttatggtactgttctgaactagaagatttgaatttcagggccgctaggagagtttcctctgccccccttttaaaaaatgtcttcaggcctaacaaatgataacatctattgttatgaattttttttccttccacagtgtgaccttggagatacctcatcatatcacacaaaggtgagctttttagaaacctgtcttgttattctagctaattactttgcaagatatcaagcacagtgttaggtcacagctctagacatcataagctgtattgtgcctactaaaatatcgaagcaaattatttgtattttctttgttccttaagactctcataattcttaaatgattgagaatctcaaagagtatatgtttatattgattatattgatatttagtgtggtagaattatacaattgaaattttttcaaaatctatttttagtttagatttcacagccttaccactgttgatattatgggctagataatgctttgttgtgaggactgtcttgtgcattgcagagagtttagcagtattcatggcctctaccaactagatatcagtagtaacccatgacccaggttataaaaacagaaaatattccttgagaacagtattgttaacagaagtttttcattgaaaaaaaacttttctacaacaaaaagttgagtaaaaagtgtgtcatttgtttatattatttaaagtctcgcatgttgagcttaataggagacaaatggattctctagagctttctttgcaatttgcttcaaagaagcaatatgaggctgggcacagtggctcacgcctgtaatcccagcactttgggaggctgaggtgggcggatcacaaggtcaggagatcgagaccatcctggctaacacggcgaaaccccgtctctactaaaaatacaaaaacttagctgggcatggtggcacgcacctgtagtcccacctattctggaggctgaggcaggagaactgcttgaacttgggaggcggaggttgcagagagctgagatggtgccattgcactgcagcctgggtgacagagcaagactctgtctaaacaaacaaacaaaaaaagcaataagctggtggggcgcagtggttcacacctgtaatcccagcattttgggaggccgaggtgggtggatcacttgaggtcaggagtttgagaccggcccgaccaacatggtaaaacccgcctctactgaaagtacaaaaagtggctgggcatggtagtgcatgcctgtagtcccagttacttgggaggctgaggcaggagaatcgcttgagcctgggaggtggaggttgcagtgagccgagttctcgccattgcaccccagcctgtgtgacagagagagactccgtctcaaaaaaagagaaaaagaagcaataagatgacctaacctcatgcaaatatgtagttggtagaagatgtatttttaaagttttcagacagttgtgggtatttgttaaaacactaaatcaaaacttcacaagtggtggtttcttaaattagttacggtggcattttacatattaataaatttattccatcagtactcattgatctttcttgcacagtaaatggatcttttgctccatacttgcatttataatatcatgcattagttacttggaatatattggtttatgttttattgtgtcaaaaatcacttttagtttaaccaccaatcttactttaacacgcctttaagtattgaaaagctgccaagcctacagtagaaggaacaagtttttcaaagtccagaggaaagcttaaattttatcattgggaacaaatacgtatttcccttgaagtgacaacctctcacttcatttatttttgagaatgatagttgaactggttttttagaccgagtttcactctgtcacttggctggagtgcattggcatgatctcagctcaagcaatcctctcacctcaggctcctgtgtagctgggaccacagatgtgtggcaccacgtcaggctaattttcttatatgtttgatagagacacggtttcgttatgttgcctaggctggtcccgaactcctgaaggagctcaggccatctgcctgctttggcctctcaaagtgctgggattttacaggcgtgagccactgcgctggcccagttgtacttttaaataaaaatgatgttctgtgaaaaaagtgatttttcagttcacagttaaatcacggattctttaaaaacaaacaaaaaagcacttctcattaactttccacttattcagaatattagagacatgtcaagatttaacaacattaatttttattgcttcatcaaagacgttcttaagaaattcaggctatgttttttacctgtaggggacagtgaagaatagaatgactactaatgtaattggtaccactgccttgatttatgctgagaaaccagccattgtacctacttttgcttttatacaatcatggcaagtgtcaacgaaaaagcaggcaatgactttcacaaatttttaaaatttttcatcagctttctcaggtttaattagtatgattcagaacagtgttggccaggcacagtggctcaggcctgtaatcccagcactttgggaggccgaggcaagtggatcgcctgaggttaggagttcaagaccagcctggccaacatggtgaaaccacatctctactaaaaatacaaaacttagccaggagtggtgacaggtgcctgtaatccctgctacttgggaggctggggtaggagaatcacttgaacctgggaggcgaaggttgccatgagccgagatcacaccattgcactccagcctgggcaacaagagtaaaacttggtctcaaaaaaaaaaaaaaaaaaaaaaaaaaaagaacagttatgacctcttaggccttctggaaggggtcttcgggatcccgagaggtccacacagcacatttggagaaccactggtttatacacaggcacaatgcattagttttacaaagtttaaagttcatcaaagactggcctcttaaaaaggcaggtgagtttgtcattcagacaacagaaaatacataaaaacatcatgagagtatactacagagaactaaagagaaaggaagctaggaaatctgaatcacatttacatttattaaagtttactactactgctttgtagaacattcttgtgtttcaatgtgtggttagaagagtgaaaatatgtttggtttattgccatggcctgttagggagagtcaatactcatgggcatttctgactggttatcatataaaaggcttcacggtacaggccatgatgtactgagaaagaagaagtcaggaaaccctctgcaagtcaggatccaggagaagaattcgtaaaaactgctttggtaaagtaaacaccaaagcacacaggaggaagtattttactcaacaaatattatactaagatattaacagtttttgaagtaacgcgctttcttattttatagagatgcagatagatctttgagcatacctgatgaacagttaactcatttgcggtaagtggcacttttattgaggttgtattttcattgtacacttgtatctgtttcatgctgaagtcaaagccatctttttttaaatcttccccatttcatgttgcatttagtcatcttaagtgttgtaaaaagaatgtgctggagtaagaactgatctgcagctctgtttagttagtgagctagtatgagtaaatatactatccaaacaacagaaaatgtatctttttttttttttttttttttttttttgatggactctctttctgtagcccaggctggagtgcaatcgcgcgatcttggctcactgcaggctctgcctcccaggtccctgttcaagcaattctcctgcctcagcctcccgagtaactggaattacaggcatgtgccaccatgcccagctaatttttttttcttttttcttttttttgtaaagacagggtttcaccaccaggatggtcttgaactcctgacctcgtgatccacccaccttggcctcccaaagtgctgtgattacaggtgtgagccaccatgcctggcccagaaaatgtatctttttaaaaggtaattgtgagctgtctataggaccctgcaagccactacccaatttttgaagccattcctccttctgttccacacaggtttccaccgtgcacattacgaagaacagaaatggaggtgggagtttaaataactattcctcctccattccatcgactcccagcaccagccaggaggaccctcagttcagtgttcctcccactgccaacacacccacccccgtttgcaagtggtccatgtgctggtccaacctgtttacatctgagaaagggagtcacccagacaaagagaggaaagccccggagaatcatgctgacaccatcgggagcagcagagccatccccattaaacagggcatgctcttaaagcgaagtgggaaatggctgaagacatggaaaaagaaatacgtcaccctgtgttccaatggcgtgctcacctattattcaagcttaggtgattatatgaagaatattcataaaaaagagattgaccttcggacatctaccatcaaagtcccaggaaagtggccatccctagccacatcggcctgtgcacccatctccagctctaaaagcaatggcctatccaaggacatggacaccgggctgggtgactccatatgcttcagccccagtatctccagcaccaccagccccaagctcaacctgcccccttctcctcatgccaataaaaagaaacacctaaagaagaaaagcaccaacaactttatgattgtgtctgccactggccaaacgtggcactttgaagccacgacatatgaggagcgggatgcctgggtccaagccatccagagccagatcgtggccagcctgcagtcatgcgagagcagtaaaagcaagtcccagctgaccagccagagcgaggccatggccctgcagtcgatccaaaacatgcgtgggaatgcccactgtgtggactgtgagacccagaatcctaagtgggccagtttgaacttgggagtcctcatgtgtattgaatgctcaggaatccactgcagtcttggcacccgcctttcccgtgtgcgatctctggagctggatgactggccagttgagctcaggaaggttatgtcatctattggcaatgacctagccaacagcatctgggaagggagcagccaggggcagacaaaaccctcagtaaagtccacgagggaagagaaggaacggtggatccgttccaaatatgagaagaagctctttctggccccactaccctgcactgagctgtccctgggccagcacctgctgcgggccaccgctgatgaggacctgcagacagccatcctgctgctggcacatggctcccgtgaggaggtgaacgagacctgtggggagggagacggctgcacggcgctccatctggcctgccgcaaggggaatgtggtcctggcgcagctcctgatctggtacagggtggacgtcatggcccgagatgcccacgggaacacagcgctgacctacgcccggcaggcctccagccaggagtgcatcaacgtgcttctgcagtacggctgccccgatgagtgcgtgtagtatctgttttatttgactgcagtctccttggtgcaaaaacaaaatgggaaaaataaggataactcagaatttcaaaaggaaatcacaaattcagctagtaatagcattttcagtacttttcgtaaactaagtgaatacacaaaatgttgatttttctgaccataagacatattttatgtccttttgccaaggtggatgtgttagtctcaggccctcctggccacattgcccaagtcacacaggcttctgtattatgtatttagataaaatgtgtgaaaatatatttgaaaaaaagttcataaatatgcattgatttttgtacacatggcacctctttttcatttttatttttattttttttttggaggatgttttgctctgttgccccagctggagtgcagtggcatgatatctgctcactgcaagctctgcctcccggattcacaccattctcctgcctcagcctctcaggtagctgggactacaggtgcctgccaccacacctggctaattttttgtatttttagtagagacgtggtttcaccatgttagccaggatggtctcgaactcctgacctcgtgatccacctgcctcggcctcccaaagtgttgggattacgggcgtgagccaccgtacccggcccatggcacctctcttaatttataaattgaactggatgtgaagtaataatgtcagctagttgagataagaaggttacagttcggctgggcgcagtggctcacacctgtaatcctagcactttgggaggcctaggcggactgatcaccaggtcaggagattgagaccatcctggctaacatcatgaaaccccatctctactaaaaaaaaacaaaaaattagctgggcatggccgggcgtggtggctcacacctgtaatcccagcactttgggaggccgaggcaggcggatcatgaggtcaggagatcaagaccatcctggctaacatggtgaaaccccatctctgctaaaaatacaaaaaaaaaaaaaaaaattagccaggtgtggtggcgggcacctgtagtcccagctacttgggaggctgaggcaggagaatggcgtgaacccaggaggcggagcttgcaatgagctgagattgcaccactgcactccagcctgggcgaccaagcgagactccatctcaaaaaaaaaaattagctgggcgtggtggcgggcacctgtagtcccagctacttgggaggctgaggcaggagaatggcatgaactcaggaggcaaagcttgcagtgagcagagattgtgccactgcactctggcctgggcaacagagcgagactcggtctcaaaaaaaagaaaaagagggttacagatcattgcacatggaaaatattcccagcagtaaccacttccattaatgtgatctacagcttttaaaaaggagcatctcagaataagatggtggtacaatttgcttattgagaaaggaaaaaaaaaaaaacacgagtatattacaaagggaaaagaaggaatgtgatttctcatgattgaaagcttgatttagattgcatacagcttttgctacccaagaccaagaggctctggcaagacagggtggttttccgaatgccagaccgaggtgccttatgaaggcagctgccgatggttccagatgtagagagataggtgatgcaggagggaaagctggattggaaaagggagagttttgtagatgggctacgctcattgtgcctttgaaagagcagagccggcagcctctagtcatcatttggatatacaggactagagcatgaatctgatgtagagctacagaatgaagagcaacagcagctgtttaaacaccaagaaagtgtgtagaatgaaattggacaagccaagcatggtgttttcatgcctttagtcctagctactttggaggctgaggtgggggaattacttgagctcagcagtttgagtccagcctgggccagatggtgagaccctgtatcttaagaaaagaaaaaataagaccaggtgcagtatctcatgcctgtaatcccagcactttgggaggccaagttgagaggactgctcgagtgtaggacttcaagaccagactgggcaataaagtgagacccatttttaccaaaaaaaaatcaagaaattagctggacatggtggcacatgcctgtggcctcagctacatggcatggcaggctgaggcaggaagatcacttgagcccaggaggtggaggctgcagtgacccatattcatgccactgcactccagcctgggcaacagagtgagaccctctctcaaaaacagataaagtggacagaaaataggtcagtaaggactaatcatttaagggacaagcccccagaagagtggctactagagtgggaggaggaaaagcagaaggagaaagagttgaagataggcgaggctgtggtcccagtgctgaattctgccaagcagtgacttgattcatgaacactcactggatgctgactctgtttctcttctgagtgctggggtagaggagaggagaggtggagcacagttcttgcttttatgagcttatgttctaggaagttcaagtattttttcaggtagtatgaaatagcaggaagaggaagcaggctaaagggacacagagtgattgggggctattttaagtagaatgataaggaagagcctgtctagagagctatttgaacagtgacctgactgaagggacaacagaaagcagtgctgacattacaggtagcaggatgactgccaagacagaaacgcatttcatatgtgttcgaggaacaaacagcaaggtgaccagcatggggagagtgaagaatgagggaaaccttgaatgagaataaagcaattccatgttggatgctaatctgccatattctgattaatcccagttccaacaattcatctacgatttctattttatctttttaaaaaatatattttttattttttgagactgagtctcactctgtctcccaggttggacttcagtggcacaatctcagctcactgcaaacttcacctcctgggctcaagcgattctcctgcctcagcttcccgagtaactgggattacaggcgcctgccaccacgcctggctaatttttgtatttttagtagagacgaggttttaccgtgttggccaggctggtctggaactcctgacctcaggtgatccgcccacctcggcctcccaaagagctgggattgcaggcgtgagccaccgtgtctggccatacacatccctgctgaagcccgcattacccttcccctatgctatagaagccctgggtcgggggggtgggggtgatggcacagggatccaccatcttatcttggtgccatccctgacttgccttctgttcataaacgcctattaaatgtttctttctgagaaactggatttgtcagcctctttctttggtatctcaggttccttggcctttgcgggtaggtttatatagacctgctcagcacaggacaggcagtttctcaaaaaattgaaaatagaattaccaaatgatccggcaatatcacttctgggtatatagccaaaataattgaaagcaaggtctcatagaaatatgtgtacactgatatttatagcagtggtattcacactcgtcaaaagatggatgcagccgaattgtccataggcagatgaattgataaaatgtggtatatacatacaataaaatgttcttcagccttaaaaaggaaggaaattctaacacatgctacaacatggatgaacatcgaggacattatgctaagtgaaataagccagttagaaaaagacaaatacggtgttccttcacttatgtgaagcgtccagactgagtaagcaaactaatagaaacagaaagtagaacggggtttgccagggacatggggaagggagaaaatgggaagttgcttagtggatatagagttttggttttgtcagatgaaaaagttctggagattggttgcatggcaatgtgaatataccctacattacccaacccaagggctctccttgacccctgttccaactgccacttagaagtggttaaggtagtaaattttatgtatattttaccacaattcaaaatagaattattatttttttattataattttttgagatccctcactctattgcccaggctggagtgcaatggcgccgtctcggctcactgcaacctctgccttctgggttcaagtgattctcctgcctcagcctcccaagtagctggaacttacaggcacatgccaccatgcccaactaatttttgtatgtttagtagagacggggtttcaccatgttcgccaggctggtcttgaactcctgacttcaggtgatccgcctgccttggccacccaaagtgctggaattacaggtgtgagccaccatgcccggctgtcaaaataggtgttttgttgtttttttttttttgagatggaggtttgcttttattggccaggctggagtgcaatggcaggatctcggctcacagcaacctccacctcccgtgttcaagcaattctactgcctcagcctcctgagtagctgggattacaggcatgcaccaccatgcccagctaattttgtattttattttagtatagatggggtttctccatgttggtcaggctggtctccaactcctgacctcaggtgatccacccaccttggcctcccaaagtgctgggattacaggtgtgagccattgcgcctggccttttttttttttgtgatggacttttgctcttgttatccaggctggagtgcaatggcacgatctcagctcactgcagcctctcctcccgggttcaagcaattctctttcctcagcctcctgagtagctgggattacaggcatgcaccaccatgcctggctaattttgtatttttagtaggtatggggtttctccatgttgatcaagctggttttgaactcctgacctcaggtgatccacccacctcggcttcccaaagtgctaggattacaggcgtgagccacggcgcctggcctgaaaaaaaattttaaagtttgagaaaatacaaaattttcatagtctccaagtatttctcctaagatctttccccctatgagggggaaagatagtaactttacaatggagaaacccagcagaaacctgaaccaaatgaacaagttcaacatcatcagtaagaagaactatcaatgccataactctgatggaatgcactgggaaggattccacatcatttttgtgctgtaattgccaaaagttcgtaacttcagtccaatcatggaaatacatcagacaatcccaaatcgaggaacatttcacaaatactgatcagtactggttcaagatgtcacggttatgaaagataaggaaagattgaggaactgttattgcagtcctacaaaacggcgagagactaagaaataactaaatgcagcgtgatcctgggtggaatttgggaacagaaaaaggacattagtggaaaaagtggtgaaactccaataaggtcttttgtttagcgaatatgttcattttaaatcagttaaattatttaaatatatttaaacattagttaaatgtatgtaattaaattaataaaattggttattttgtgaaataattttaatatagttaaatatgagaatgtggatttcctggttctgatcaccgtactgtggctatctaagaggtgcatgttcagggaggctgggggaggaataaatggacattatactattaagttggaagagagaaacctaccccatcagtcacaaaaccctcacattcatggcagtgtgtcggacgttgcagtatgaatggcatttcccagatgtcagcgcgaggtccctgtggagggagtggggctccctgggaatctagtggagagcattcggggctcccttcctcaggagcctgcccttcctgcacagaagcgtcagcctcacctctgtaccactgcccctctgcctctcagaacccactcggcttcaggaagattctactgccagcctcctttcccagatacagcctccagggactcagccctgccttcccaagtgttcccgcctctcttgggaaggggtgctctcagatcccacacccctggacttccctgggcaccacctgctccttcttcacttctccagctctgcgttctcactctgagggtcctctcctgctgggagtgtgtgttgctggcaacagtgaagattcccccctgggttgccccccatgccctgttcttctgcacttccctggcttcctgcgttggttctgctggtgtctcctgcttttgggtttacgtggcttcccagcttcctaatttctctgaagttgagtttgatgtgtgtattgatgatgggctttttcctcctcctcctcctcctcctcctcctcctcttcctcctcagtcttgttgttgccccatatactttccagaaggagaaaagggacactgtaaaattaagctgctgcaggctgggcagtggctcatgcctgtaatcccagccctttgggaggccgaggcaggtggatcacctgaggtcaggagttcaagaccagcctgttcaacatggtgaaacctcatctgtaccaaaaatacaaaaattagcaagccatggtggcatgtgccggtaatcccagctactcgggaggctgaggcaggaggatctcttgaacgcgggaggcagaagttgcagtgagccgagatcatgctactgcacttcagcctgggtaacaagagcaaaactccatctcaaaataataataataataataataataataataataataataataataatgccgtgtttctatcagacccagaaatcccgcagagtgagctggaattctctgtttatctgtttccccttcatacccactggctcctctctgcccgctccttcttggactgcatcagcagggtgcctcactgtctggccctagtggaattcacacagtggaggacgtcataggaggtgggagagagagagagagaggagaggtggttattcactcagattcttccttgctggtttggcagtggccacatctttctactgatggctgcagctcctgatgatcctcctctatagccacagctctctttgggatctgtggacacctttcctgtccctctagacccagggagataacagctcccactcttgctggtccaggacattcctcatctcttactggttcccttaactcggtccacacttctgtgaacagcccctttcctcaagcacccattcgaatatgtcctctggcttccaccaggagcctgactgatacccacaggtgggtgaatgctggcgtgctgctgggcccctcttcctctggtgactggccagccaagtctccaggagtctcgttagggtgggcaggcggtgggcacagcataaactgtgagctcaaatccacagaacaaaagtgggagaagacactggcaggatggaccgccacaaaactcttggcattcgtgacgtctgtcctttaaatcacgcaaggcatcatcatgcttcagacatgagacagcctaagtatttaagtgtttcaaataaacaaattgtttttcagaattggtaattgctaagttggcaaattgctattggaaacattggctgtcctcgactcaatgattcagccagctagtcccttgccaaactagtttgttgggcaaattccaccttgagaatttatctgctcctgtcaaagccagattctccctgcctgaggggaggctggacttgaccttctgactcaggatatgctgacttgggtccctaggtccaagggcggccctcttgggcccactgtgggctggacctcttccatgatggggtggtggagggcaggccccacctgattcacacttgacctcatccaggcaggtgaagttccctgcaggagtcacctgagcccagcccctcagaccaggatccatcatgtttaggaggatttggggctatctcatgttctttggctagaaaggggtcccactcttaggggtctgccctctgtggggcacagatggcttgctggggcccatggacggggctgggtgaacgggaatctggtcacagcagcagcagctggaaggccaagagggagggcaccagggcctgggacccatgtcttgtcctgagcctccccgggcctcttgccttctccccagcaggcatttgggatctgtgtctggacccagcctcacccagaaggccatggtgtgttgtcattagaatcacagtgctcacaccaaggcagtgcattaaattagcagggcagggtctcatgggcaggggaccatgtggagggggtggggggaagggcagttgtccccagaggccgtggtgggcctggctctgggctgggcagtgggccagggtcctgctgtgtggatgagctctgacaacaggctgtctgggtctggtgagctcctgaaagcgcggactggtggagagtaccctagggtgggagctcatgaggagggggtctgtggggtctggaagccattctagagcaggcagatgacatttatcaggggagcaggcatagaaaggacccttgtgcgagtgggggggacacagcctcagaagaaacagggaaggggctttgacaggtccagggagaatccctgaggtttcctagaacaattcccaccagccatgtcccaggtgtcgccccatcccccaggcctctgcagtgccagcccaatgccctgggcaaagcatcctggactctggctgttacaaaaggaggacagggtcatctggacccgcctgagctccaggcccccgactttcacagccccttctgggtccagaagttcatacgtatataaatgaaaaatgtgcaagaatcatattattgtattctttttcataaagaggcccctctaaattgttgaagccccgattcacccctgcccaaaggagacagcaatggcatgtgtggggccacagtcttgagacccagaggtcctgctgcccacgatacccactgtccaccctaggggtactggccgtagccctggagcccgcaaacaccatgcaggaatgcaagagggtctcagctccagagtcccaggctgggagggcccacagtccagtaaactaatcaggccctgacacatccaggagagcagctccaggagcctgcattggggagacagcctcggacccctgccacaggcctgcaccccagaagtaggagcatgggaagacctctccttggctcctggccagcagaagtcacattccccagccctctggctccaaggcagcctcacgtcccagtcactccttggcacaccctaccggttggtcagagctcactgccaaagggcacctcaatgatgagtggagggaacaggtgtttaccaggagcttgcatgctttgtctcagggatgattagggacacagccaagaaggcacgctatgcccattttacagatgaggaaacggaggctcaggttgggctggtgactaagggaagcagcatgtggcaggtggcttgaggcatgtctgtccatcatgagtaactagggagcagccctgccactcctcatgcgatgcaccaggagccagggaagctgctttctaggggattctagctaaggccagaagcatctccctgagtggtggtggaggcctctgtctactcctccaggactgccaggggataggagggcaccgctgacctcacagagcctcttgggtgagtgagcatcagctgagtgacaccaggtgactacgcttctgcccagtgctgtgcccccctctgactcaggcaaggcaccaccctgaacggcccaccctgtcccatggaggccgcaaactgctctgcagagccagggtctccaggaatggggagggcagtcaccctcattccacttgtgttcatgacccaaaggactgcccaggtctccaggcccatagaacccccaaacctcttactaggccacactggggaccttgagcagcaggcttggaatcctaggccttgtctccaggtacatatcagtacccaggcttgggaagctttggtctcaggggggctggcactcaggccctctgcctcaaggaagaagcatgtccagatctctactgtccagccctgctccctgcccctatccttcacggggtccctaggacagggttacagaagcctcatgctgtcaggggatgctgccaccctagttccagggtggctccgcccagccccttcctgctgccgccctcactgactcacctgtccagcctcctactgggctggggtgagggcttattgccccagagcctagacaggcaccagaggcagctataaaagcatgttgggccagtcctcagcatcctagtttgccactgtctgctgccacacgatgctgggaggcctggggaagctggctgccgagggcctggcccaccgcaccgagaaggccacctagggagccagtgaggacccggggctcctttctacctgggctggggggatctggggcagactgagtctgtgggaggcggatctacgtaggcaggcgaggacctgcggagaggccttggcccctcaggaaccctggtctcctgctctaccaagtcagcacggagttgaggggtgcagacctggggaggtctcctgggggcagggcatgagtcctggtgctgggtgaacactggcagcttggacccttccctctggaaatctggggagcctttcttgtcaaaacagcctattctgaataacctatgcaggaaaaggaagatggatttttatttttaccataactttaaagcttcaaagatttcttaacaagtcaccaagtctgttcaaagtcaaaaagggcattttcaatttcatccaagtcccctaaagcatgtttatttttatttgtatttgtatttgaaatggagtcttgctctggcacccaggctggagtgtagtggtgcgatctcggctcactgtaacctttgcctcctgggttcaaagtgattctcatgcctcagcctcctgagtagctgggattacaggcacccaccaccacgcccgactaatttttgtatttttagcagagacggggtttcgccattttggccaggctggtcttaaactcctgacctcaagtgatccattcctcttggcctcccaaagtgctgggattacaggcgtgaaccactgcacctggtcccgaagtgtatgttgtattcagaggtcagcaggtatgtgtggggaggcccagccaggccccactcatgggtcatcgtgtgaaaaagtcttgcctgagtttgtgtcctctttctaaatggcagcagatgcgtattttgtttttgactctgcagctggtgtggaccacctgctttaacctttcactagcctctgagttttttatgattcctgctgggagaaaagctgagcgttgggagaaaagctgaggcagggcttgctagacttgctggctccttgcttctagcactgccattctctcaagtagccatatgtttctcattcacttgatacactgttgcctttcaacctccacatcctcaccacctgtttctttgttagatcaccaataaatagcgtgggctcccagaactcggggccttcgcagcctccacactcgcgatagcgctctgctcccattttctctctcgaactgtctctttctcattcctttgactccgctggacttgccgcccccgtgacctggtgttgggtctcatcatcccaacagattcccattctaaagatgagggaaccaagaggtggaaggtagagttagaataagaaccatttcttctgactctgaaatccttcagttctagcacactaccacccacactttaaaaaactctgaagtaggcagagaattccgttttgttggaggaattgctttgagagacctggtcttactggatgaggctttggaaaccaacctgaggcaggcgctagcacatcctgagaggggtgtgacctggcacacaggcccagcctgggcttcatgtctcagctggcaagactgcctgctcattgccattccaggccgggcagggccaaggggcttcagggacccatgccctcatggggctcattgagctcgtctcccagcagccaaggccctggcatctccaaatgaagccagctgtgggggaaggtccttctcatgagccagtctgtcctggctgggggtggcatcccagagccccatctaggatgcccagggatgtataggtctgttgtgaggataagccagcactgagccctcaccctggactgggagggcagtgggcctgctctgagccctcaccctggactgggagggcagtgggcctgctctgagccctcaccctggactgggagggcagcggctctgctctgaaccctcaccctggactcgggggcagccggcctgctctgagccctcaccctggacttgtctcctctgttcagttcatgccgtggaggaagtggtgaaggaggtggtgggacatgccaaggagactggagagaaaggtacagccggctgaggtcgggcagggaaggagggagggaggaagggaagctaggtgctgggccaacctgttctttgactaaccaggtcaaactctgcccctaatgttgcagcctttcagagcctcttagctggggcagttatctatgctcatcagaggccacagactgtactgcgttaggacactgtctagatggttctctctgtggaataagaagacaaagtcacacaagactatgtgacagcacactgggacaaaacatttaacatggcagggcgcggtggctcatgcctgtaatcccagcactttgggaggctgaggagggtggatcacgaggtcaggagattgagaccatcctggctaacacggtgaaaccccgtctctactaaaaatacataaaaattagccgggcatggtggtgggtgcctatagtcccagctacttgggaggctgaggcaggagaatggtgtgtacctgggaggcagagcttgcagtgagcctagatcatgccactgcactccagcctgggctacagagcgagactcggtctcaaaaaaaaagaaaaaaaaaattgctgggggcggtggctcacgcttgtaatcccagcactttgggaggctgaggtgggcggatcatgaggtcaggagatccagaccacggtgaaaccccatctctactaaaaatacaaaaaattagctgggcacggtggcgggcacctgtagtcctagctactcgggaggctgaggcaggagaatggcgtgaacctggaaggtggagcttgcagtgagccgagatcgcgacactgcactccagcctgggcgacagtgtgatactctgtctcaaaaaaaaaaaaaaaaaaaaaaaaaaaaaatttaacatgtaaaattctatgttaaatgttaaattgatgtgtgtgagctatgagtagtactatgtacaaagcatgtgtatatctccttccttttcaacaaaatagattccaggtagatgaaggacttacatttacataaatgaatttattaacttactaggagataaccatcttagcgcaggctgctattataaaataccataggccaggtgcagtggctcacgcctgtaatcctagcccttcgggaagccaaggcgggtgggccacctgaggtcaggagttcgagaccagcctgaccaatatggtaaaaccccattgctactaaaaatacaaagaccagctgggcatggtggcacatgcctgtaatcccagctactcaggagtctgaggcaggagactcccttgaacctgggaggtggaggttgcagtgagctgagattgcaccactgcactccagcctgggtgacagagcaagactctgtctcaaaaacaaaaacaaaccataaactgggtgacttagaaacaacagaaatttatttctcacactcctggaggatgggaagtccaagatcaaggaaggcactggcacatttggcatctggtgagggagtctttctggttcatggatgggcccagctctgtcctcacatggtggaaggagctagctctccgtggtctcttttatgtgggtgctaatttcaacctcccaaagtccccaccccttaatatcattacattaagactgaggatttcagcatatgagttttgaggggtaagacatcataaacatttagacatagtaataacttcagagactttggcctaatcttggagaggggagaatctttagaactatgacaaaaaaatcagcgccataaaggaaatattaagtaaatttgacaatccaaaactgaaattttctatagccaaaaaaaaaaaaacactataaaccaagccaaaagaaaaattatacactgatgaaaaatatttgtcataaaaatgataatccaatataacaacccaatataaaaatggtcaaaagacataagcaggcattttccagaaaaaaggataagcaggcaatgtacccatgagtagatgctcagtctcactcacagttgaagaaatgcaagttgttggggaaattaaaaccaaattcaaattcattctgcagtaatcctgctgcccttggtcccatcgggccactccagagactaatccattaagatggccacatcccacaggccactcaaggggacacaagttcagcaggtggatcactaggacattcttcctctttccaacagccattgctgaagccataaagaaagcccaggagtcaggggacaaaaagatgaaggaaatcaccgagacagtgaccaacacagtcacaaatgccatcacccatgcagcaaaaagtctggacaaacttggacagtgagtgcacctgctaccacggcccttccccagtctcaataaaaagccatgacatgtgtacattgagcgctggatttattcccatttggatggaaacactaggcaaagtattttcttgttgacataacatattttacatatttatggagtacatttaagtatttattacatgcacagaatagtgatcaatcagggtgtttggggtgtctatcaccttgaatatttggtattactatatgttgggtacatttcaagtcccttcttctagctactttgtttttttgtttttgtttttgtttttgttttgagacagagtcttgctctgtcgcccaggctggagggcaatggtgtgatctcggctcactgcaacctctgcctcccaggttcaagcaattctcctgcctcagcctcccaagtagcttggactacaagcgcaggccaccatgtccggctaatttttattattattattttttattgtttttatttttagtagagatggggtttcaccatgttagccaggctggtctcaaactcctgacctcaggtgatctgcctgcctgggcctcccaaaatgctgggattataggcatgggatactgtacctagccttctagctactttgaaatatacaatacattgctgctaactatagtcaccctaggtgaagtatttttcaacagaaacactttgcatgtcccccgtgtctcctctgctgaggtggacactggcactggggcccctgctgctggttggataggtcctcatgatgaaacagatgcttctctgtcatgctaagtaagatctttcatgtcaggaaggggctcttctggaagaatagttagtgtctgtgctacatttcctaaaaaactgtttccccagaaactatatacagctttcaggtgcctcagtgcttcaagacatgctaagggaggaccctcatttgtcttgcatgtttttgggatttttcttgagatgttcttgcaggactcagggcagataacagaccagcttgatgaagaatttagcaaggaaggcccccactgagctgcttcctgttctcgcagagatcagataagcatttctgctggacagttacagaatctggtcaaggagagactgagtcactgctcatcatcctagaagctgctgttgattttttttttttaaagacggagtttcactctgttgcccaggcaggagtgcagtggcatgttcttggctcactgtaacctctgcctcctgggttcaaacaattctcctgcctcaacctccccagtagctgggactacaggtgcccgccaccactcctggctaattttttgtatttttagtagagatggggtttcaccatgttagccaagatggtctcgatctcctgacctcatgatccacctgccttggcctcccaaagtgctgggattacaggcgtgagccaccgcacctggcccagaatatttatttagagagtgatgtcaggcctaagtgttgatagtgggtagtagtgggcaagatgcctggccctctctctttcttctcatgagagaaggtggaatgccttccaccaaagaaacgagacctccccatgaccagctgctccactaaccacacatcctccagtgatgcctctgaatggtcccgaggggctgtggtggccgggcagagccaggcaggagccagagtcagcctggggggtgatggagctgaggccatcaccggtctgacagtggaccagtatggcatgctgtataaggtggctgtgccgcctgccaccttctcaccaactggcctcccatctgtggtgaatatgagccccttgcccccggaaaaaaaataatattgcatatgcagttgattaaatggcatactccatggctattaggaatgatgaaaatgggctgggtgcggtggctcacacctgtaatcccagcactttggtaggccaaggtgggcagatcacctgaggtcgggagtttgacaccagcctaatcaacatggagctgtgtttactgagtggggctttcgcaggctggagctaagaatttccagtatgcgtaacagccacagcccaaatatctgccagtgagttgtgtaattccccagagcaggcctgggcagtgtctgggtggggcctgggagccacaggagacgcccaaagccaggcagagcccgggggcgagggggcggcaggcaggtgtagcgctgccctgggcgggcttgcacccccacacccaagtgagcggcctgctcactcctcagctgcaggagccagacgtgtggagtcccagcagaggccaacctgtgtctcttcatctccgtgagaaaggtgcccccgaagtgaaagagatggcctggtggaaagcctgggtaagtgggagctggcaggagatttgggttcctgcatggtgttgggtgctggtcaccagggagtcctgagaaatgtaaagtcgcccttggctgggagtggctcagtctacatttggctgcctcctgggccaagcatggagggtgggaaggggccgagaagaaacagtcccaggcctagagtgcccacggcagggatgggacctgggccgggagacaggctgatgaagaaatctagaaatgcaagggggaagctgaggtttgagaagagtccaggggagggacccttgcaggggtggggccactcaaaggagggggtatcatggttgagccttgtgtgtaaatgtgtatggggtgcacacacgtgtgcatttggggagaatcaggcatactgctcctggcagagggaactgtgtgcagagggtcagagggcggggagcttggctttgagggaagctgctcagcacagctcaagggtcctggtaccggaggagatggacctggggaagcaggcagggccaggtcctgaaaggccttgcctggcaggctgaggagttaggctttaccttaagagaagtgggaaggcactgaagggctttgagcatgagagtaacctgaacctgctgttggggacccatcaatgccttcacctcagggatcaatgatgttcatttgtcaagactggagagggaagaggggaagcaggaggacctagcctgctagagcctggaggaacccggggctcagggcagcccatgcccagcagaactgatgggttctcgggagctttctgtctatggttgagcctgaggccatcgctgtgctaaggagttgaatatccagaaggggacagaggtgacatctcccggctgccggctctgcacacccttttcctttcctcccaggcagcctcaggatgtcagggctgcactttctgttttgcagatgatgaaatgaaggctcagagacactgagtgacttgctagggtccaatggccagcaggctccagtcagagagcagttgggtctctctgcccagccccaggttctctgtgagcttttgtgggatacccaggcttgtacagcttcagggagtctctggatcatagatgtcgcaacccaagcaagtgtcctcagggtcagacatgctaggttctggacaggtgggacaaagaggaagccaggctgaggtggggcagctgtcctggcccccagggaagcagccttcttccaggacaaggggccatggaggcctgcagcttcaaccagactgctgggaacctgcctttgaggaggtggacatggcagggagagcccagtgctgggtggtttccaaagtcagttgctggccaaggcagtctggcactgggccttgcacccagtgcagcaggacaaagggctgtccatgtagggacctgccaaattgacaggatcactgtgacactcactgagtccctactatgtggccggacccttctctaagcacctcacattcaatatctcccttgaacctcacaaggagtctatgaagtagacaccagtatccttatccacagatgaggaaactgaggcacaagtaggctaggcaggtgcccgaactcactagtaagtgtgagagtctaggtgagaatctgaacagcctgactccagggccaaaaccataccctggtcgtccataccccatgtgagagctggctcggggtagcaagttcacaggtagaccccacctgcaacagctgagctgctagcgaagacccagtgtcctctaggcacaaagctgggccaggaacgggatgggaggagatgagggagccactggagagagatctgtctgcaggcagggcccatctgcacctctctttttggtgttgccttttcctctgtgtctctcatagagacaaacccatctcccaggcctctgggcagccacatagcaggggaaggccaaggcgtggcagctcccctgtgcctgtcacagaacaagttatattaatagatgtagtcacaggctggtctgagtcaccttttcagtgaaaatgtgcctgtctggactagcacggccctgggcaagaccctgcaggagcctgaggctgacccttccttctcagcaggaggtctggagctctaggactccacactgatagccagggctccgattcccagaacacttattttctaaaaccttagagtgggaagtgagacagaggcttctcaatgcagcaaaatcagaaccagcccgggagctgcttacaaatgctgcacctgagatctaccgcacccctgcgggactgcatgctcctcagggatgcggttacacagcctggccactcactggtgcaccacagcccccgagtgctggggcagagggaagccggcaggcactgagagctgagatgcctcccacattcccagacgacctgcgttcctgtgggtgaagcttccttcagtggaacgttccaggaacactcattgcctgggaaaggtggagtcatcagtagggcaggggaggtagatagagctcagcttctgagtcaggctggggagtcccaacagcatcgcttaatagctgtgtaagggagtccagctccctttctgtaaagtgaggcatcagtacttacctagcacaactgttgaggaagccatgacataagcattgcttctaaagcacctggcccaggtctggcacacacaaggggcttgaagtgctaacaggagtaatagcagagcgtgactccacaagcaagggatatcgtgtgtgtggacaccgatgagcaatatctgggaccacactggctctctctggatggaatttccataggaattatttctaacaatttctgctgtgaaacatggtgctaagaaatgactcaggaagatctgtcaccagacatttgaaattaaagcaaagagttcagaaagatgccttacctcttactcaaaggaaagatacttacagatataccatccatgggaatctctgtattttcacaatctaacccagggcttcgatggatggatggatggatggatggatggatggatgggcgggtgcatagatggatgggtgggtggatggatggatggatgtggtagtcaaatgggtaagtgcgtaggtgggaaagtagatgggcagatgatggaggtgatggaaggaataagtgaacaggtaaatggaagacaagactggatgggactaaactctttttcatcctggaggatctctgagtctccctctaattcaatacctatctccaatatccctccattctctaccattcctccacccaaaacacacttatgtccatgttaatcatctgagaaattctgcagggcacaagtttaaagagccctcaggcaagccctgaactggaggcttggaaatcaagggttcaggcccttggttatctggtttatttcacaatctgcagagcatcgtgcgggtttttctaaacctgacgctctgagccccatgggcctgtggacttgcaaacaccctgaactatcaatatgctcagctgggcccctgccctctaagttgctgtaagtcccaactccccaggaagagggcagactgagctcaaaccattcctcagaaaggcagaaccatgctcagccttccaacctcatctgcacactctgaaggtggtgcatgcagctccaggaagcctttgcttcagtgttctttcccctcctaactttgggtgagtttgtcccttcctgctgctggtgggtgatgctggaaggagctgggtgtggctggggctgctgtctgcagtcagatggcacagacagggacaggaaaggttttgtggcttctccccacaagctctggctctggctactccaccctgttggccaaggggctgaagggtggagcactggcctgcaagggctgagcagatctccgtgcccagggaaggggctcaccctgtcagggcgggctaccagatgggctgggagcctgctctgccctccctgtccctgcctgctttgagcaggcctggttctcttgcagattgaacaggagggtgtcacagtgaagagcagctcccacttcaacccagaccctgatgcagagaccctctacaaagccatgaaggggatcggtgagtgggtgttggcagccttgccacctctgctcaagacccctccgctcacagccctggaaagcgggtgccaggggacatctggggagctggggtgtcccatgatactctgaaactgattccactacccagagaatcacacagccctctgtttctgcagtgaggtcagcacccaccctgcaagactggacaggagggtgctgctcttccctgggtaatgggggtggggaggtgagctgtgtgtctctgtgagtgacttcccatcagtctcagctttctcacttgtaaagtggccccaagaattcttggcctcgtgtgtcacatgaagtgtgaagggggtggtgctttatgatgccaggcacagagctgctggggctgtgaggtgttgggagtttgtggggctgattcaaggcccccttgccccatgtcgatggccatggagccggctcccttcccatctcctgcacttgcccagtgctgccctcagcactaccgtgagtgggcgagggctggcctgaggccagatttaaacagcttgcccagaaagccctcctgacctgagagcagagcatgtaccctgacctcaccccaggtgggactgaccccttagccggctctgcctgaggatcaggggccttaatgagaactgccgctcctgacaagcccagaaaacgttctcatgccctctgctttctgtgaagcagaaagttatctccacttcccaaatgagaaaacggaggcccagggaaatgaggctggctgcccaatgccatgcagttgctgggccaggcctcggattcaggggttggactcttagtcttgaccttcccctactgcgaccaacacaaaggagggcagggccagagatctcactcggccaagctccaaaggcccgggctgatgtccagagccacccagacctcagattccatcttgtgaggctggccttgggcacgccccaacattgtgggggtgtgggtgggaaatggggaggcagatttcctaagggtcttgtttacaccacgaaaatggtctgggggtttggaactatccaggtgtcgggtcccaactgctcagccaccaagcagctgccttcgccttcccctcctccgccctcaccagtgtgtcaccctgggggcagcagggtcacttgtgctgtaaccctgcagggaccaacgagcaggctatcatcgatgtgctcaccaagagaagcaacacgcagcggcagcagatcgccaagtccttcaaggctcagttcggcaaggcaaggggaaggctggtgggggtggggataggtgagccttggggttgggggtacagcctgggaggcagctccattctggacgactttcccctagagccagcccactggcagcatgggcacatggaacctgtttgcatgaaaacaattgttctttattgaaattcaaatgtaactggctgccctgtgttttatctggcagatctacttttaggtgtcagagcccgggccgggggctggccttccttgcttcctttcctgcctcctctctcacagcattccttctcatgcacccaacaggccccactggaggtctgtctccctgcccccaggctatctcgccctgccctctgagcccagaccaccttctcttttccatgccccaggcatgcaggcctggctttgctctgttctggggcgtgggcatgctttcctcagttgagctgcttgcacccacacctcgtcccttctgcctcctgggaattctaagagcctggagtaagcatgccaggccctttgtttctcctcccacctgcactccacccctaggacaaagcctgacatttgggggtacacagtaaacacaggattaaatatgtgcacagccatggttgcctcaagcctctagtgactcatatcattagtttggagatgtaacgaaggaagatcagctcaaatattctcttggagaacccggtatgcatttttacagtttccctctcttagtcctcacagtgatacattctttgtattcaaacatttggggaaactggcactcagagaggttttaagttgcccaaggtcccagagcctgtaatcaacaaggtggggattaaaatccaggtctgacaaagcccttgatctctctgctgctctgtagatcagctgatgtagcctggtggctcctcgtagcaacatgtgaccttagaaggaggcacatgtgagacgaagtctttaattcaggcatgcattcattcattgagtgccaagtgacaggtattttatggtgatgccatactcagagcttgcagtctagctagcaataccaacttcattttactgagagcttatgatgtgcccagcactgcactgaatgctgaattgagtcacacacaaccccctaagcaacgggatgaagcaggagcacgtttctctccgtgtaaccggtaaagatactgatgctaagagaagctaaggagctggcccaagaaacccagccagcacgtggcaaggcccacgcagaatccagcccaagcccctggacccagccaccactccgctgcctgcactcaggtgggcctggcttatgacaaatatcacctttccctgttcccgcattaggacctcactgagaccttgaagtctgagctcagtggcaagtttgagaggctcattgtggcccttatgtacccgccatacagatacgaagccaaggagctgcatgacgccatgaaggtaaccaggcagacagggcaggggagtggcaggggtgctcacatgactgggtaggggcaatgcggggaccgggaacctacagcccagagctccccttgagccactgtttggaatggccatatgggccatagctgggcccagtgagcaggcagcctgctgctcagactgcacccaacacctggagtcactggtgcctgattgacacgttgagtggccgtgatgaagccaaaatcagtacttctcagaacctcacgagctcaggtgtacagtggtattggaaacccacctctacagtcccaggcacagccccttgggtttccctttacctctcactactctttgcttttgcagattaataaggatggggacccagtaactatagtcattttgtttggaaagacacttgctgcatgggcactgccaggcattttacacccacgctccctaatctacctttggcgcaggggaggcttcttattcctgtttatggatcgggatgcttaggctccaggacatggagcagcctgtctgagaccacccagctaaggagggagagctgagacagggcttccccgtcacagcacttgccctcaatgttcatcactgaagacaagcatgtgattttctcatcacatcctcccacttcaagtggggcagggcagtgaggtccttcctgaggctcaggcatcttgagaaaagaaggtgtggacagagcagaaggtcatggcagagcactccagcaggcagaggtttctgtccacagggcttaggaaccaaggagggtgtcatcattgagatcctggcctctcggaccaagaaccagctgcgggagataatgaaggcgtatgaggaaggtaaggggtggcacagatggaggggctcaggagtggccacaagctttggcagcctggcagggaacaaggatcaagaattaacctgggccacactagaaaggaccctttggggacttttttacccacaggtgctgagcacctaccgtatgccaagatctgtgcctgatggtgacactgaacatgactcagacttgatctgtaagctcaccagctcctcttacaggggagagaggcctgtgaccaactaaaatctctgcccttgaggactgtggtagtagggggtgtggaccccaggctagcagaggccagtcagtcctccacatcatgtacctagtggggagttttcctggaggctttggctttgccaagccttgagatgaaatggagcttggttggcagcccctagcctggctctctgacctggtccatcttgtgctttgagcttggttgggtacgcatgtcgcttctagttgtgaagcaccacccaggcgacagccacttggacacccgggcattgcatccatgccctgtgccaaggactttctttcctagaaggctttaataaggagaagtatggggaacagggctggaaggaggaaagcaggccccgggtaggctgtgggcctctgcttgtgcctcatggtcctgtttccctgcagactatgggtccagcctggaggaggacatccaagcagacacaagtggctacctggagaggatcctggtgtgcctcctgcaggtgtcacagcctaggctcttgggagtgccttggtttgggagtcccaacagctccaccccagggagcagcccttgaatagcgccacaagagtcagggtaggggcatgggatagcccagcagccagggctcattgggtgtgtctcagcatggttagagggtcccaactgcagagcccccacacctgtccttactcagccatgtgagagcatcctggaagcgggaggagagcaggtccttcgtgcagacctcatgccaggcactttgcttaccttagctcactgaatccgccaagccttatgaggcagtccttaccacccccattgtacaaatgaggaaaccaagggctgaagagaataactggcttgtcgaagtttccacagccaaagagcagcagagccatgcctaccctccaagcccaggatcccccctgtgcccttaatgctctggtcagctggcctgtcttacagagccacctcctctgttcctagggcagcagggatgatgtgagcagctttgtggacccggcactggccctccaagacgcacaggtgaggctgcgcccagccggccatgtggccccaccccctgccatctggactctggctcctctgcccacgggggctttctctgacactgggctgggacccacccagctcagctccctataggcctttgtcctgtggtgtctggggaggagagtgagggtgttgggagactcgggaggaaggagtgtgacttgggggtgggggagcactaaagctctgtcctggcaggaacagcccatgaacccgggggcgctaggccccagtgctggacacaggtgtccgggtctctgtaggtctgcctgctggcagagggaagtctggggaccaggcagttcctagagcagcttgtggcccaggatagagaaaatattctaagccagagctgctagagaaaggggagctccctatcagagatgaccaagcaggggagcatgctggcctggcagagtggacagggccaggccatggccacagctctgggactctggggctcagtccctcacctccctggtctccctcactggcttattgtgggtgtcccaatgctaggatctgtatgcggcaggcgagaatattcgtgggactgatgagatgaaattcatcaccatcctgtgcacgcgcagtgccactcacctgctgagaggtaccagggagggaggggctggggccggggccacagggggtgtcctggccatgagcctctccctcgtgcttctgccttgtcaagtctagagttagggagagagccagggagcccaggactgtttccccagccaccagtgggaggtcagggcggcaaattgatgtgcgatctctgatccgagacactgaggggcatcacgaggaggtctgaccatcccctgagcagagccctctccacagtgtttgaagagtatgagaaaattgccaacaagagcattgaggacagcatcaagagtgagacccatggctcactggaggaggccatgctcactgtgggtaagagctcagacttgcacgtttttcaggccacagggctcaccgtggggcagcaccaaagaacaaagggcctagggatgcgaccacaagagaaagaatccctgtgtcaccttcacgggatgtccccccgactcacactctgcctgtctccctcacccagggactgctccacctctagagtcccagtgtgtgctgccaaagattgttctctgtgctgcccacgtggtgcccagtgctgtgtggatgtgtctgcatgagtgtgtgtgtgcgtgagagtgtgtgtgcctgagggtgtgtgtgcatgactgtgggtggaatgtgagtgtgtgtgtgtgagacagacagtgtgtgtgtgtgcgcacacaaatgcatacgccagtgattatgccagccccaaccctgtgtgtactcatggcagccatgcagggagcactctggctgtggttgtgaagccctggccagcacaaagtcatctttctggacatgaaccaggggcctggcccctgccttcattgccagttgaagaaacagtgatgtgtggcttgagtccaaactgagtgacggatggtctgatgctgagaaacactggggatcttccccacagcaggaagtcagggccactcaggaggacccactccagagctctcatgggttccagggctgagatcacaatgggaagagtcactgcagagtaaagagctgaggcccagggcagagggacgtctcttctcccacttacacacagagcccaggtccggactcctggcctgcagctctcacctccacaccaggctgcctccgtgcaaagccagcagccagcaggctccctgctgtttcctagcctctctgggtggacagggccatctgagacactccagctggccttggatgctgtgatacaatccggtctatgtcaggacatctaatcacacccctgctccaatctcagcttccacccctggatctggcctgaacccaccaagaatgaagtctgccagcagggaatagtgaagccatgcagtgctccgtcatgctgggccttcctattcacttcaccttgaagcctcgcatcagtctcacttcccagatgagtcagggaggttgagtaatgaagccatactgcaccatcaaggcaggaagtgaacacatgcctacctcactcaaagcccatgctccttctgcagccctaagtgaaaatgccaaccttccccacccagatgccaagtctctgagcagtacccatgggagcaaacatgggcccagtctctggaccagacgcccccaggtgccttagtcctgtggggccaaactccacttgtcacatgggaattcaaaatgcagggttcctgctgataagtgtgagagagagggcactctgaggccagcagccaccatcccatggtgcttctgtggagctgagaggctggatttttggtggaggtgtctctgggttgagagcccagggcctgtcctgagtctgagctgcccttggatgggcttgagctggtgtcttcagacgagccccacagtctggtgcatttcacatcttacccttttgcctgcctgcttgggcctttggagctgtgcccagtgccccgggctaccttccctgtcccacaccacctgacacaaagcctctcacattgggaaaggcacggaacaaagaaatatgccaagccttgcacaacactgactcttaagacctaaggcaagacataaagttgtaggcagtgccacctaccagctccagacattaacacagctttcttgtttgccagtgaaatgcacccaaaacctccacagctactttgcagagagactctactatgccatgaaggtaactgtcctgtcttcttcctgacgctcaccctacatagcaccaagtgcaaagccaaggagctcaaagccaccacgatcctccacacgggggagttatcttacccaaacctgtcgtggatcagaaaggttttagttctcggaggtgaaattgagtctgggaaagggacgctgcatctccagaggtgaataattccctgaaactaaaaccattgcccgttttctctgattgatggttgctgatatcccctgaagttagttccacacctgaaacccaagccctctggccacttctgcccaggaaatgagagagggcatgcgattcccttggccatgtggccccagctgacatgagactggtcagggatgaaggtgagcaggaaggccctgcctgtgaaattcctggctgagctgattgctgccattgctctagtaggaagtcttgttcctggagcagtgagtattttgtgtctagaatctgatgtggcaaaccaaacatactgcagtttggagcacttggcatcataaaggaagagttctgggcagtgggtgagaaggaattaagggagtggacaccctaagccaccaaagcttccctcctaatgcttccctggctgaagcacaggctccttcccacatctccctccctctaaaagccccagaacccaaccacacagatccgtccatcactcagagatggacaggaaaggtgaggcaggattgttgatggctgctgtcttgcccagggagcagggacgcgtgatgggaccctgataagaaacatcgtttcaaggagcgagattgacttaaatcttatcaaatgtcacttcaagaagatgtacggcaagaccctcagcagcatgatcatggtaagcaggcattcccaatgctgaggccagcctgaaacccagacattcagggaaacctggaggctgtggccaacactacgtgagcccctcccttcccagtgggcaccatgtgcttgcattcatgaccatgtggtgtgtgcagggaacagcagaggtcagtgtggctggatcccaaggggaatggggggcagaggggagatgcagagaccagggcacagaggctcccctgtgtcccactcagaaagttggtttcacatttaagttatggttgctccttggaaaagacaccaaatccttgcagaagaagccacctctgaatagtcaatgagatgaactagtccggtaggaatcgggcccaccgctcaaatccagatttaagtagtcctggcggccaacttctaaggagataagtcagatgagcgccaatagactatctaaccagattccaattagcaaaagttctggagccttcaaaacacagactgattatcacgctgcgataattgggagaaacagctcttctgggggtgtctgcaaattgaggtcttgatgatttcattagcagaagtcacattaggacaaatgtatccccaagttttctttggctactaagtcaagtctctagctcttctgcaaatgtcgttgttaagtgcacttttcaagaaacacatagctgacaataggtggaaaagacatttctgtttccagatgtttcaagatggcaacatcttgaaacaggtgggcaggggcaagagaggattggaattattcttggtttcacttgaggctccccagccaatcttgtcgggagacaggagggcaaggcacacaccagcctggactgtgctgtcacctgcagacagtctgagctgattgtcattaacccttttaaccacacatggtaacttacggcatcagagagatttctacagatacatgaagccaccctcttcaaattttatctaatgttgttacttaagaaaattgagttagaatcatgaatacattgaccaaacgtttctttttagtgtagaccacagatgtcattaaagcaaaaatggttttcaacactaatatgagttaaaaactcctgcattgaaattaagaggcaaatgtataaacactccaagtataactcatgtatttgaaaaagtaaacaaaattaatgcttttctttctaaaaactattcgaaaaattgtcctcaaaataataaaaatcaccaggcgtagtggcccacacccgtaatcccagtgctttgggaggccaacgcgggaggatcgcttgagcccaggagtccaaggctgccgtgagctaggactgcatcactgcactccagcctgggtgacagagtgagatcgtgtctagaaaggaaaaagttaaaaaaaatttcattgtagtttgaaacccgtaatgagatttcaggctcaaaacaggcaaattttactaaatggtgaaaagtagacaataaccatgagacctaaactggtccagagtgtggaaagtgggtctagccccagtctaccccttactcaccatgccgttgtgaatgaattcactcccctctcttggccccgctgtcctcaactgcatgaagaagaatctgggtgatctgacctggcccatttcccagctctgtatgcagaccccggactagccagtcccatcaggacctaccactatctaagaaacagggctcctcagtcatcggaccacaaggtcagtctcatcaggagacaaacactgtggacccgatgtgagccagatgcagggcagaccagctcgccttcctcctgctgtaccctcaccacgtctcagcaagatgcacagcagcacagcattgatctcatttcatagatgagtcccacagaggtgaaggggcttgcctcggccacaccgtcagggtgcgatggtccaggctccctccacccccggccctgcccccaggtgtgtgctgatgcctcactctcagccttgattcccaagctgccacagcaggtgttgaataatgatgcatcctgttgtgtaaatgaatggctgggcaccctggctcccgaatagaagaaccctgggacagctgaccccttccttgtttaggagtggaactgtctctgattcattttccacatcaatcctgcatgtagttggtaagagaatcaaaaggaaatgtaaaggaatagcctgaaattaaaaacaaggaaagaggggtgatggcacaacccctgcggctaggaaccctggagggccgggccaggtgcaggccaggggcacacctcttagtcataataacacagccgccactgccgagccaggcacaagcaaaccccttctcacgcttatgcgcctcctgcccacaggaagacaccagcggtgactacaagaacgccctgctgagcctggtgggcagcgacccctgaggcacagaagaacaagagcaaagaccatgaagccagagtctccaggactcctcactcaacctcggccatggacgcaggttgggtgtgaggggggtcccagcctttcggtcttctatttccctatttccagtgctttccagccgggtttctgacccagagggtggaaccggcctggactcctcttcccaacttcctccaggtcatttcccagtgtgagcacaatgccaaccttagtgtttctccagccagacagatgcctcagcatgaagggcttggggacttgtggatcattccttcctccctgcaggagcttcccaagctggtcacagagtctcctgggcacaggttatacagaccccagccccattcccatctactgaaacagggtctccacaagaggggccagggaatatgggtttttaacaagcgtcttacaaaacacttctctatcatgcagccggagagctggctgggagcccttttgttttagaacacacatccttcagcagctgagaaacgaacacgaatccatcccaaccgagatgccattaacattcatctaaaaatgttaggctctaaatggacgaaaaattctctcgccatcttaataacaaaataaactacaaattcctgacccaaggacactgtgttataagaggcgtgggctcccctggtggctgaccaggtcagctgccctggccttgcacccctctgcatgcagcacagaagggtgtgaccatgccctcagcaccactcttgtccccactgaacggcaactgagactgggtacctggagattctgaagtgcctttgctgtggttttcaaaataataaagatttgtattcaactcaaagtatctttggatgtttagcagggaccagtgtaggaccaatttaatttgtcagaaacagagctttggggagccacgaagcctgagcgcctcgtgggcatctcccagtgggaacactggatgggctgtacctgagcacctcatgggcatctcccagtgggaacactggatgggctgcagccaccgctgccctggggacaactcttgcaaatgagggtagattctattcacctcctgatgtgtaggctacatccttgtatctcagggttagagagggatttaaagtcagctggtgctgttccaacctgtggcctgactacccccttggcatccacccaggggtggtccttggtgtgcttggggtgcacttgggtactcagggtgtactggcgatactcagggtgcagttgagtactccgggtgcacttggctgcctccaaagatgggactcactgcgtcctttgacagcccaatctttttccaatggatgtgaccagcaaagttcttgctttacctgaaccaaaatcagccgcatcaagcccacacctctgccatctagggccacaacacttattccctcccagtaacaacattttggatatctgaagaaggcccacaaattctgcgatgacctctgtcaaagcccagtgtccccagtcccttcagtggtccctcctggagcctgtttggggccatcacccctgaacatgctccagtttgcaaacttcccctcaagtggccctgaggggtaagcgtgtgcccaggaaccagcctgatcagggagatgggaatagcgtgggctctgaattcacttggacgggaggcagattctggctctgccctgcaccagctccatgactttgactgtgttaggctattcttgtgttgccataaagcaatacctgagtctgggtaatttatttaaaaagggggtttaattggctcacagtcctgcaggctatataggaagcatggtgccggcatctgctcagcttctggggaggcctctggagggaccttacagtcatggcagaaggtgaagggggagccaacatcacgtagcgagagtgggagcaagagaggtggggggaggtgccacacacttttaaacagccagatcctgttagagctcaagatggtgaggacagcatcaggcgatgagggatccgccccctgacctaaacacctcccaccaggccccacctccaacactggggatcacatttcaacatgaaatttggaggggatatccaaactatatcagtgactgagtcacttactctctgagcctcagtttcctcacatttctatacagggtgggctcccagttacaactgctgcctttcgaaccaccccagagccagtagcataaaatcctcatgtataatgttcacagattctgtgggtcagcagttctggagggcacagcaaggtgcttgtctctgacccaacaagtaaggggactcagtctcagttgggaagacctgaaggttgggtgactctagggcagaggggtgcaaccatctggatgcctcttcactcacatgttgggcccctggtgagatggctggaaggccaggctcaactgggactgtcccctgcactcctacacgtagcttctccagcatggtggcctcagggtagcaagtggtagggctccaccgtctcccagtggacaagaaggacaccacattgccttctgtgagttagcgtcaggagtcacatggcatcacttccccggtgccctatcagttgaagacaccacaagccaccccagcttcaaggaaaggggacacagacccaatctgtcaatgagaagagtgtcaacgaatctggggactgtttttaaatccaccacaagtggtgctcagaatatttaacaactggtgcagcacaacccactcacctgaatggctgctgtctgcaggggtggagcagagctcgagtagcggcccctgcagggccaggcctcaacccttagtgctggatggcagggtgtctgtggggccccaggggaggctcctgggtgttgggggtgcagcagctattcaccaacatgtcttagtcttttcagactgacatacaaaataccataaataggtggcttaaataacagacacttattttgcacagttctggaggctgggaagtctaagatcaattcagttcctggggagggcctcttcctggcttgcggacggctgcctttttgacacgtcctcccatgacctttcctctgtgcttacacgtgttcacggggggaagagctctctctctctctcctgctcttttcataagatcactataccatcatgagggccccgccctcataacctcatctaaccctaattagcttccaaaggctcatctccaaacaccagcaaactgggggtaagggcttcaacaatacacaatcagactgtaacacagcaaggcaggggcccttcgggagtttaacaaccttttagtagttgtatcagtgtgcgtctcttggatcccagccctgggtgagaattcttattcctttctttcagttcaagtcctgctctgtgtgcagacttgctttcagttctgagccattgcctagctgctttctgccaaaactctttagaaaggatttagaggggccaggcgtggtggctcagtctgtaatcccagcactttgggagaacgaggtgggcagatcacgaggtcaggagatcgaggccatcctggctaacacggtgaaaccctgtctctactaaaaaatacaaaaaaattagctgggcatggtggcgggcccctgcagtcccagcttactcaggaggctgagccaggagaatggcgtgaacccgggaggcagagattgcagtgagcagagatagtgccactgcactccagcctgggtgatagagcgagactctgtcaaaaaaaaaaaagaaaaagaaaaaagaaagaaaggaaggaaggaaggacttagaggatctctctgccctgcaagctcccctgaccactggttcgatgggttcttttgcagcccaccccaaaacaggcctcatgtggccaaacaggagccttgagaagagctgcagccaaggaaatttggtcaagtccaagtacatgcccagcaaggggatctgcttaagcagagtcatgaagttgatcatctcccctgatggggcagaatggacatcacccccactgcctccctgccagcagagaaatgtgggacaggcctggaagcaagaggtctcctcagattagaggggaagctctctctgcctggggtcagagctggagcagcatgggtgtaaggggtcacggccccatgtgctgactccctccaggtgacccccatggcacctggggaaggaagcaaaggggccctggccaggacaccagcagcatccacagcacctgctaatcatttttgctggagtaaccttttgggcacttctggtaaagcagacacgctccacaggtgcttttgcaattgctctttggaatttgttaaaaatacacctatgtttttaaagataatttggagtctgcctagtttaatttcagcataggggaaaaataagggaatagtgacaaagtttctttacttgagcaaacttgagtcaggctcctgaaccttctaggctcatctgtgtactttcttgtaaaatccaatttgagcaagaatcccactaagtcaattcagcaagaactccccttgttcctatctgaccactcccaatatccgatcagggtcctcatcctccaccttcccaggtgatgtctggtcaccctggcctttcttcagcaggtctcctgttaggtcagtttagccagcatcaccctcacccctggcatttcctcttggtaattttccatctttcaactcctacctgctccatggctccaagtctcaacttctcatgctgtttttagaatcagcctgactgtatattgaggtctcttttcgcttattgcaatagtcctgaataaaatctggttttactactttatcgtctagctctggtttttctttgccataggtattccctacctgtagccttgccatagctctatcatcgttgctttttaattccctccaagagatgatatctacatatactccctctctatcctcagatcaatgttttgcatttcctaggagctgaattccttttcttccattgcagcactggctgggagagaaggcacaacatggtccagcatactgagccccaagtttgtcctgcagcatgatttgagacacagtgttcgtgccacacagaattctgtgagccgtccaatagcctttcatacatttgttttctgcttaaactacagagtagatgctcttgtcagcacctaagaacactctctattacacagaactacaccctaatgacattttatctgtttacgtgtcctctcagaaaagctgtgagccccttgaaggcaggaactttatttgtttttaaacattcagggcctagtagatagcaggctttcaacaaatatttttgaataacaacaaacaagagtatggactttgggaacaggagagcctagtagccagcaagcctgagccaatccttgatggcctccaattctgagaagactctctgggcccccttaggctccctgtggaagaaagcttccccagtcaatcctaataaaaatacttctgagacagatctaacaggacaaagtggagtctctccactctttcagtagctccttcaccccaggtgctgtttggggttctgacactgccatggcatggccagcaggatggcccctagggctcctggggctgctctataagagcttcccacccctgacctgcagtccatgagggcaaggccagatccgggcacacgcccatccgtgttgttctcatgctctcagggggtagagctagtgtgttggacttggcatgtttagggtcacctccctgagggttgacaacctgagcaaaatcagcattcccttggcaaggaataaagggggaatggatttgtggtcagcaacccacatcgttggtcagcaacccaccgccaagcattctgcctgcaacagggtggggctggccaggggaggctcctcagggaaggtgaaagctgtgcagagttttgcaggatgactcagtgcttatcaggtagacagataaggaagaacattccagggagagggaggaatgctaacaacagcaggggatctggtctgtactagacatgccaaaggaatggtgtgtccatatcaacagaggagggagagacagaagagaaagagcttgtcagggcctgagtcagagcgggctcatgctgtggggctaagaagctcaaacgatttccagagacagtggggaagctttacagggacaggcaggggaggatcttaacccggctttcgtaagcctctggcttgagtatggaaggtgagtctgggacagggagcccagcgccgaagtgttgcaacgctatagggagacatacagaccaattccctcccacctaacagctctgtgctttggggtcctgggttagtttcctgggagaaggctggccttggctacctctgtccttgaccaaggacatcgttttaaatatttgtgatgtgtcctaggccactgcatctctgtccctgtagtgaagagaagatactgattcctaagctcctactctgagaacacaaatatctgcaatacttcggtaagccctaggcctgagtgtgaggttgcaggcacttccatggccccatgcaggtgtccaagttccctcgtggtatttggccaaggggggccctgtgtgatgccctagcgcggtgactacccgtgttcctggcccatgggcatcttccacggaattctgggcttagcctggggattcatgcgggcgcatctctgtgatctgctctggagcaggatgtacatcaggtctctcagacctgagtccctggtgcctggcgctcagccttgactgaagtgctcggcccaccctgctgggccagccagctcctgctcagggccacagccctgtaaccacggcttcctccccaggactcaggaattctcccactccggaatgccttgctgctggggtgaccaggtcttcacttgtgaaacaggagtcggccacctcagccctgcgcctggcctggtggaacatgggtcaccgccccaacctggggcagccgccccatcccaacgcagttgctgccgctctccatgcctccctgtgcccagctaactgggggacttgtcccctgggaaaacctgggtacccaggctgcctttggtttcagcccctactcctcttcccgggctgcctttgctccccggacggcccctttccccgggctgtgttcacatcggctgggaagggtcccttgcagacagatcttggacgaggtcgcgtcccccctcgtgaccagcaaactcctaaaagccgcccttgccccagagcccctgtagcctccaaccggcagtcaggaggcagcgccgtctcagcgccgcttagtggcgccaggcgtgcctggaaatccgctttcgcagcgccccctcgtagccgcctccgcccgcagaaaggcgttccctggacagagaagcgggcgcgcgggggcgggcgcgcggggccttgccggagaacctgactctccgcagcagcagtggaagccagagtgacgcgttgtgttgaacaccagttttctggagcgctgtgtgttctcatagctgagcagtctgtttctccaatcaggtttcaaagccacttcaactgcactggcccctgtgggtcactgctgcaccgccctggcccatgtgggtccctgaggagcgacctgccggggccacctggctggacgaaaaagacacaccttggacttaagccgtgagaaaaaaaaaacttcatcagtaagaaacaagtcaatagacaagtaaaagactaggagaaaatatgcataaaacataaaaaagtgacttgattcctgattctggagtatttaagaattcctataactcaacaaaaagttcagttttttaaaatgagcaaaaggcttgggtaaactattcacaaaggaacatagacaaatgccagtacacacatgagaagcgcatacacatccacaaacttcaaacaagcccacctcatgtatttctagtgagtaaggaaaagaacgcaaacacttttgaaaattgtttggttgtttcttgtaaatttaaacaaataccctattatattatccagcgagtccatccttaggtttttatccaaggataaagaggtgaaaactcatatctaacaaatagacttctgaaaagatgaaaatagaagctttattcataaaagacaaaaactagaaataacccaaatattcattcacaggagaatgaataaacagactaggttgaatccatacaatggaatggtagcagacaataaaaagaaaatgaactattgatgccccctactgcacagcagaagctctgaatcgtgttcctgaatgaaagaagtcaggtatgaaagaataaacattgtatgattccatttatatgaaaatgaatctgtgatttaaaaatcagactagtattaggttggtgcaaaagtaattgcggtttttgccttttttttttttttttttaaatagttgctttggggtttatggatggagtggcatggtagaggttagctgaagggggcatgaaataactttttgggggtgctagagtgttgtaaatcttacagtgggggagggacaggagtgcaggcatttgacaaaacacattgaattgtgaaatttaagatttttgaatttctttgtatgtaaattacctgccaataaaaacatgacgaatagagcagttatgagcatttgtgtgtagctttttgtgcaaacttaaattataatttctctgataaaagcccaggaatgtgattgttgagtaatatggtaagtgcatgttttttgagaaactgtcaatctatttttgggagtggctgtgtgtatcatgttatattcccacaagcaagggatgagaaatttggtttctctgcatccttgctagcatttggttttatcattatatttttatttcaactgctcaaataagtgtgcagtgatttctcatgatctcaatttgcatttccccaaaggctaatgatgttaaatatatttccacatgctgatttgactcggccatgaaatgtctcttcatgtctattgcccaatttcttattagattttttttttactgttgagttttgagagctctttatgcattgtaaatgtgagtcctttgtcagatacgcgtttgcaaatattttctcccctccatagcttgtcctttcatcatcttaacagaatattttgcagaggcaaagtttttaattttgatgaagtccaatttatcaattctttctttaatgaatcgtacttgggtgccatgcctatgaactcatcctcaactcctaggtccagatgattttctcctgtgtcttcctatcatagccagaaactagaaaagaaccaaaatgtccctcactaagtgaatgcttaaactaagtgacacatctatgccaatattcagcaataaaaagaaacaaattattcatgcaaataactaaatggatggatctcaagagcattaggctaagtgaaaaaaaccaatctcaaaaagtcacatactgtacgatttcacttgtataacattcttccaggggcaaaattataaacagtgaaaacagattagtggttggcaggtgttagaggcggtggtggggaagtgtgactacaaagaggtagcaggagagatcttgggatgatgggatagttttgtgtcttggtggttacaggaatctacacatgtgatacaatgtaatagaagaacacacattgtgctaatgtcagtttccttgttttgatattgttctgtagaatgtaaaatgtaaacagtggagaaactgggtgaaggatattgggaccccttcacaaattcttgtcaatctacgattatttgaaaatttaaaagtctaaaggctctgggcagggcctctctctctctctctctctttctctctctctctctctctctctctgtgtgtgtgtgtgtgtgtgtgtgcacgtaggttttctattttacatttcaagcagatggccaggcccttggtattgcacaggtgcttgcagtgtgtattagccagggttatccagagaaatagaaccaacaggctatatacaggtatatgcaagaggagatttattataggaattggctcatgtggttatggagactgagaagtcccacggtttgctatctgcaagctagagaaacaagaatgtcaatggtgtgactcagtctgaggccgaaggcccaagaagtacagggctggggggtggggcaatggtgaaagtccaaatgctatgacctgaaagttagtgtcccctaaagattcatatattgaaatcttaacccccaagggatggtatgagaaagtgcaggtatggggaggtgattaggtcaccagggtggagcctcatggatggaattagtgcctttataaaagaggtcccagagggctgcctcagcccttccaccatgggaggacacagaagacattattggccaaaagatgctaacaatgaaccagagagctgactctcaccagaaactcaatctgccttgatatggacttcccagcctccagaactgtttaaaataaattcctgttgtttaaaaattatacagtttgcagtagtttctttagagcagcccaaatggactaagacacagtgggaacagtggcctgaagtgaaactctcttccatcttgtgttaagatggaaactcctgagaggtgatgctcagtgtctctgaatgagggagtgggcagggaggtagagaaggcagaggtcagggagttagagatgtagcttgcacgtcactggacccccaaggggtgtctagatggtgccaggcccagggacccagcctcaccatggccctggactgaaggacccatgcaggctggacagtgggtgattggggaaaccaagaggactgctgaccagggggcttctggacacaagactttgacccaaccctggagaaggaggagcccttcagggttatgtgaaaaatctctctaactatcaagaattccattttgaaattatgaatctttgagatgaaccacaaaccttgcaaaaatttcacagaccacttgagaatgtggccccagcttggggtgttcacttcctctatcagctggagaatttccatggaaagtataggaaagcctgccttagagtccatatgggagatcccagcctgagcctggctacaggctatgcagaggcaggacccaagaggagaccagaaggacaggactgtagtgactataggttgctggctcatgatcacccgggcagccaggcctcagcaggaccagacattggaaagcccacaggacccctgcttggggtctccttcaggtttccctgctccctgggccatgcggcctcagctctgctgtcttctccccacctctgcctctctgtgtacttggctgctagtagccctgcagtctgcggttgctcatcctctgttcagatgaccccatggccactttgctggggagagattctgatcccatagtctgggtcaagctgtctatgcctgatctgaccaccaaggtcataccatacaatcagggctgctgctggacccagcacggggtatggagaagtttgagggtgtggctgtgggcagagcaggtgtccccaaagttgtctccagcaagtggaggagcctgttcacctgtctccccatgagtggcccctgtcaccttgcttcctttactcctgctccagatgcttccacgaagctgagccacatgggaaagcaagcatccctctgccaccctcactgccttggcaccgccccttccatcagatcccactcctgcctgctgcctgcagcctacctggtgagctcatgccagctcagagaccagggctgggcctgggcagagggagtcccatgccttatgtgcaggaagcatgggtctgggctgttaacagcaaagccattgtatttgtccactaggcagccagaacaaagtcccacgcactgagtgacaaaaaaacagacattttttttttcctcagaattctgcaggctgcaagtccaaggtcaaggtgtggggagggttgttttcctctgaatctcatggagccaggttttgctgatggccgccttcctcctgtgtcctcccatgcttttccctctgtgcatgtctgtttcttaaactgttcctataaggacaacagtcgtactggatcagggcccaccctaatgactttgtttaatttaacctttacaaatcctctccaaacacagtacagctgcattctgaggaatctgggttaggactttagtacataaatttggggaggacacaattcagtgcatgccaagctttatcagcagcactaccctctctaagtggtaatttctaaaagacaatggggctctggggaaagactccaacatgttttgaagccaaaaggccccagttccagctggactgcatcgttatgggtagtttgggggccacaggcctcctggcttctgcagagaccacagctgtccagagtgaatgagattcaatatgtcccccctgcccagcacacccggggactcctctatggctgctcctgcaggatgagctccaggcgtctgatgccatgctgggtcaggaccctgtggctcaggccagcctgcaataccggaggggaccttggaatctcgtcatttcctctgacgagtgaggagccagggtagaccatgtgggtgccctcattgttctggggcagtgaccccctgctcatgatccctgtggaggttctgggctccagggacatccaggccagaatgcccagcagttcagctcatgagtccaaaggtaatctgggagtctcaaactcacggatacaattattgcaaccagaaatcctggtcctttcttccctatatccctgcttctgtgggtgggtgggggcatcccaggaggaaaactcttgctcagagagcagatggccctggaggtgtttgtttgacagctgggactccatgaagggaagggtggccccagctcaggctgtctcagaaatgggaaggaacaaagtctgcagaagctctaccctggggcccaggggacagcaggcacaggggctgagaggcatctcccatttaccctccccccagggtcttcctgccttggtggcctcagacatcagtggcgcaggggcctccctgaggactggcatgaagatgagaagggggtggtgacagtccattgttccaggagacacaagtgttacatttgtttactaggccgatgttacaaactgatttttaaaacaatgcttgcagagtcatggaacaaataccacggagcagcacctagcacagaggaaggccccctgccctgggcatctgtgggaaaccagggccccaagtctgcggtgagctggtgcagaaactctgagctgaggagctaacattatacccatctgcaactgagagaacctgccaggctccaacaaagccaaacgggaaactctccccgggagacaccgtcctcatccagggaaaccaggattctcatggaacgtcattttctactgaagaggagcgcagaggaaaaactcccaggtatcccaaagagaggcagcaaatacaagaaacaaggagattcaagtcccagaaagtaaagagaatggagtgatctaaaaggaatatttaaatgagggagtgtgaaatgtttaaacaagataaaggaataaaattatatgacaagaacagctaattaatacaaatgcagttttaaaaggaccaaagttctaaaattcatcaatgagaaatgaaacacaacagagagtttaagacaaaaggtggaataactccaaagacagacctgagcagcatctgccctgcagcactgctgaccgagacagaaaccagaaacaggatattgtgcacaaggagcacatgagaagtgtctagcaggacaggtcactccagcatcctccgctcaccccagcatcctcagctcactccactatcctcagcccactccagcatcctccgctcactccaccatcctcagctcactccaccatcctcagcccactccaccatcctcagctcactccagcatcctcagcccactccaccatcctcagctcactccaacatcctcagctcaccccgttggggaggcaaccattgaactccctctgatttttctcattccctctggatgctgatgcttagggaatgcagaccccagcccaccaacttctaagcaaagccagcaatgagaggagctccctgcttgctggaagggaaggggagtccatcctccctgcccagcctagggacttccgagatgcgctggataggtctttcccccttgatctttagcacaacccagagggtggtgatttccccctttggcatctggttggacaatggatgggcttcgctgagggctggcagccttgttgagcctgttctttcagagagtgggagtgagtgtccaaagggtcctctcagccgcctcctgctacatgcccctgcccactctcctagggttctgctggggaccccagtgggggcaaagctcaagcctgggaaggatggggaaggtctctgggcacaggtggagaatgtgaaataacatgaattcagcacttgccatgtgccaagcaggatgctgagcacatccaaacccccaggacctaaccatgcttacacgctaggagggaaggcacagagcattccagcctgtgcacagggtcaggactggatgggcccctgggtcctggctgagccgtgctgtccttccattctccagtgctcccggcctccagcactgggtggcaggtgctggcaggctgccccacacatcggcctgccccaggctgcccttgcaccagaagttgctgcttacgggactctaggggactctcctcaaactactcaggaccccagcagctcactggaccctctagctgcatggtggccccagagggcttttgtggtctgacctcagtaaatgcaggtgatgggaagatggtgtggggaagctgtgggtctggcctgaattgtgttccctctgctctgccttgtttgctgggtttctgaggtggaggagggatgagggagaggagaggggaatggggtgaagaggcaaagaattttccagtagagggagaccagctgtgagagctgtgtgtctgtcttcctgcatgctcagcatggagtgtgtgagtgcacatgtgtgtgcatatgtgtgtgtgcggggtgtatgtggtgtgtgtgcatgtgtgtgcttgtgtgtgcatgtggtgtgtgtgtgcatatgtgcatatgtgtgtctgtgtgatgtgcatatgtgtgtctgtgtgattgtgtgtgtgtgtgtgtggtggtgcatgtgtgtggtgtgtgtgtgcatgtgtgtgtggtgagtgcaagtgtctttgggggtgctgggattgtggggatgcagcgagttgccatcctgactctcctttgtgggcccctcttctccacaggcctcagagtgctttactacatttatctcacctccctatatctagcaaggggccccaaagcagaagagttgaggtgggaggtggggaatgggtgtcacccgccctggctgtttctctggcttctcagggccacgtgcttcctctccagcccgagaacacggctgtccttcatcacctactgcatggaggacagcatcgtcctgcagctcacactcacactaggcaggggagtgctgctttgagcccccaagggaggcctgaggggctgggccagagggagctccagggagctgaggggctccctgagaccttggttgggagcctgacagcacacatggcaggctggtcaggacaccactcagtgcccatcctgatctcaatgactgtttccctgaacgctccggcccctggctgcactgctactgcaggtccttgtgctccgaaagttctcggcctccctgatcttctccctcccctgccctccctctgccctgcctccttccctgggaggtggctgtgaggattccttgggtgcaggggctggcggggcaagtgtgtgtatcctgtgaacacctgcctatgctggcagctgctctctgtgtgtccctctccgccctggccggtgggggagggagacagggtcaaagccacggggagtgctgaggctttagcgcagggaagttggtgggcccagacaggggagccactgggtggagtcctgagttccaggccaggctgggaagctggagggaggcaggaggaacaagtgtccatggtgctggaggtggcacagccctagggcactgcagagctgataggcggggaggtgaggacacttccaatgcagatgcctggaactgagcccagagggaacgaagcacagaggagaggtgaggacactgaggacgggagggggcctgggcccctcttgcagctttgacggggagcagggaggaggcttcccctctgtgggagacgggaggcttgggtgtgtgcctcctgtgctgtgggtttgggagagagagactgaagtgggcatgagggggaagaaagcaagtctatgggggaggactgtggtgggagatgcagagaggcagtgggggcagggcccttcaaaggctgagtgaggaagaatgggtggctgcctcccctccaacctccctgttcctgggggtcctcccccaaactgaattcccagaggctgctgtgaggaagcggctgtgtctcaaccaatgtctgtgtgtccgctgggccaaatcttcacctggtgtcactgagggtccaagaggaggcggctggaccttgagtactcaagggccctctccccaccatgcctgaagcaaggagcccaggaaaggtctcacttggcccctgcacagggtgggcttagcgtgatgttcccgccctgaaatctgtggtgctctctcaggccccaggggtacaggctgtgcactcagccaggccctccctgatgtcaggtgtaagtggagccacaaggctgcctgaagataccatgtctcatgcctcagctgagcacccaggcctcgatgccttcttcagggctgctgaacactcggggtctctcctccctgtccttctgtgtgcctgtggcaggcaggacacccacagcggcagggccaggacacgggtgcggcaggcgagccacttaggaccctgctcagggcaatccatcacagaagccctgttttagctgcgattccagagacctacaggtgattccccatctcctgctcttcctgatccaacaaggaccaccgggcacccactctgaggctcagggagtgtgtccttccaccactgtggctcctgccctgagacaaacaccacaggggacacagggcaggtggggctggccccaggagccagctggggttcccacaggtctgcagctgccaagggcattggcctccaccccgcctcctggccctggccctgtgcattccaatccctgctgacgcctggggtgcccctggtctatgcacccaaggaaagctttctctgaaccctgcttcttgtctttctgcagtgtcacaccttcaaggcgggctgtgggtgaagctggcctgccgacatgctttctgaggctttcaaggattttcaaaaacgggagcccacagttaaaagcccaactttgacaggcacagtggctcatgcctgtaatcccagaacattgggaggctgaggtggggagatcgctttagcccaggagttcaaaaccagcctgggcaacataatgaggccctgtctctacgaaaatttttaaaatttagctgcagtgagccatgatcgtgccactgcatgctggcctgggcaacagagtgagaccctgtctcaaacctgaacattctttctaaaaatgcaaatttctagattttttgtaaaatgggaatggcaggaatagtgggtgtccctccatgtcggcccctggctggggcctggggcttcaccctcctcacatggggagctgcagggcccaccttcattccaaggccttccaactgccgacttcagctggcttgtcctggcctgctcctcctcatggtatctcctgtttggcctctgaggtcacccatccaatggccatgatgcttccttaggaagaaacttgtgggggcactgagactgtgagagagagagcaggaaaggccagcttggtgccctgtgctgagctcccaggcctgggtcccctcagtgcaagcattgggtcctctcccacagctgaggccaacagcagctgcttccaaatgtgatgctcccaggctgcactctcaacatctccctgctcaggtttctaaagggcctttgccagctggacactggaaggtacatctgagcctgggtggtgcacaccttggccagcccaactcggctaccctgagcagggctaggggctgctctggaccttcatggaacgggtggttccaagttacattctgcctctgtccctggcctccttcctgggctccctagaaccctcctggcttcttggtggcagcctgctgagagggctcattctgttgcatctggggttcaagcttctgccttggcctttccctgctgtgactgtcaccctccatgtggggcagctttgcacaagtcggccaactgacaggtcagtgctgtgactgccgggccacgtgagcagaggcagagggccgagctggtgggcagagggcacctgtcaccttgactcagctgcctccagggaggagtgacgactcacatcctcacctggggttgccagggctgctcagacgccacagcctgtgcatgtccaggggacatcatcagaggagcgcagctgtcacactggctgcacgactgagcagctttaaatcaggagcaacagaaagagaccccgacggggaggggaactctctactccacccccatcctcagctctgcatcggggagaggcagggtcgaggacagagcccaggaccaatcatggaagtgtcagcgcagctcctgtttctgggacctaccagctcccagccctgtgccagtccccgcagagctcagtgccctgggactcaagacaggcctaacagcgtcctttctgttcatgggaggcactgctggagcttgctgacattggacaatttgctcctggtagtgtgcccatggggagcagagctcagacatgtatggtgtgtctgtccccacagcctactgccagggcaccctgcagtgagaaacagggaggctagagcccagctgctggtctggggccagtggcacccagccttatgctgtccccatggagggaggatgcccagggctcccttcctctccagcagctgcagctgtgtaaatgctggtcaagcagagccccagcacacacaggcagaggtcaggacagatgaggtcatcacagaggaccacacagggctgtcaccacccatgccaggaccctggatggtaagagggcatcctcaccatgtcccagacagcagagacagatgctgtgatttatcctgtggggccaaggtgagctgagggtgtttgtgtggacgcctttgttgggctatggaggtttccttctgctcacaggatgctgacgcccccacttcttgttcttcatcccctgagataaccgcctggttcctgtttctcgttttgttgatgtggtaaattacacagatatttcagctcctgcacctgcctggccttcctgagaggaggcctggctgctcctggcctgtggtctgggttagctgctgctccatgccatttgctggtgtttccctgagagcttctcacacatgtcttttcttgctttagggttaaacttattgttgtgaggtaacaacacaagaattgtacacaggtactcacaccaccaccgctgcatattccccccacagcaatagacactcacattcacactcatgtgggccacacatccacacccccccacccatgcagattgcaccacaaacacactcaacccaccccataccacacacatcacaccacacacacatacccaaagcacacacacacataaatagcaaacacacatacaccaaaaataccaaagacacaccacacatcccatacacacaccacacacatcacacatcatacacgcaccacacaaagggcacacattcccctctctgccacacaacacacacacccagcatgcacccaacaccatacacagcacacacacatcacacacacacacaccccacacacactacacacccagcacatacacatactcacacaccatagacacacatacttgatacacacagaacataccatacaccacacacaacacaccacaagatacacatacacagtgacactgccacacataccacatatcacatacacagcaaatacacacacatcacacatagccctatacatgtacacaagcaccacactcaccacacactatgcacacataccacatgcacattacctatcacacgcacccactacacacacacacatgcaatgccacacacataccacacacaaaacacccacacatcacacatgaccctctacacgcacacagccaccatacacactacaaaccatgtatacatactacacacataccacctatcacatacccccaacacacacatgaccacaaacacacaacacattacacaaaaatagcacacacaatgcaccacacaccacagaaaaacacacactagacacaaaacacacacacattgaaccctcacacacaccacacaacaaatacaccaaattcacacactgcacacccctatacacacatacagacagctacccatactacatacatgtcacataccacacacaccacacacacacatcatacgcagcacatgcacaccatcacaacacacacatactacacaccacaaacacacactacttacacatgtgccacaccacacagaaaatgcacacacatatgcccatcacataccacacacatgtagtacacacacacccacacaccacaaacacacataaccacatacacaggcaacacacacaaaccacagccttttcctcacccccagacgtaggcacagacatttctgccctcagcagggcctcctcagctcttacctcctgcacacacagtgggggctccgcagacctaactgcagtgcaggcctttgatgtgagctggaacacaggaggggtggagcagggcagggagagtgagcctctggccataggagccaggcgcctcagcccctcacatcagcccactcatggcatcaatggtgcttctcagggccttgaagccattctccactgcaaacacatggtccaggctgtctgcaattgttgttatctacagagatgggaggtggcttggactcccggccagggggtgaggatgcagcagatcccaggctcaggggacaatgtctgtctgctttgggggcagcagaatgtcaggctctgagggccacaggcttctccagccagcagcccactcttggggagcggaggagctcttcagccctcccctctggtgtggtgggatttatacgatctgctggtcaatcacttctgcagtggccatgggtcggcccaactcacttgtggcaggttagatgatggggtggccctgggagagccacttgggacacctttccccagtaggctccagagtgacacctgccacctgttctgagtcacccgctcctactcacattggctcatacccacgatgtaaatggtggcccccaggctgagatttatcagcccaggagaaagaaggtgctgagtataaatcacccagggactctggtattccccctacatgaccaccatggggacagcaggtgcttacatccagagttgaaatattccatcttctgaattgccttcaaaggaatgaagaaatattgagcctggacagtgagatgaccccagcaatgttctaagaacttaagaaacttgaatacattatctgtgctctagtggtctgtgccctttcaaatcctctcagtatgaacatttctcctgctggcaacatgtacaaagagccctacatatttctttttgaaaaaaaaaagtaaaaagagggttgagatggagtggggttgactgttaaaaatcggcttccaagctctccaggagccactgttcattgtgcagggcttcctggatggaggagggggccaggcaaggtctctgtcctgctcattcctcactgtgatgttgactagagatttcaaggccttctgagctcatcccagtctcagggaacacaggcctaagtgacctcaccaagggccccacctggaccattgatggtgagagaggaagcttcccatggatgtgcaaaggcaactcaggctctaacagtggaccaacattcctagccctaagcctaactgcaacacagggatgtgcagctgaggtcagggacaggcaataggacaggccttcctaaccatagccctgtgggctctcttgtattgggcactctagccttcaacaggcagggctgagttcaggaaaactcagcccccacagctccatacccccgaccctgactcagtctccccttgtctctttgctataggaagcagcaaaccagctcaattagagtgccagggctccttgacttcctgtgcccctgaaacaaaaagaccaaaggactttgttccttatttcccttcttattgtttatatttgtgattgggttgttttatctaatgattttcctttctctttctcctttgtgtataagttataccagtgagttttatagttttgcattttttcatcatggtggttattatctgttcatttccagatacaagacttccctgagcatttcttggaagtcaggtgtagttgtgataaatttcctagtttttgcttgtctgtgaaagattttatttctccttcattcctaaagagtaactttgctgggtataatattcttggctgttagtggttttctttcagtactttgaatttatcatcccactctctcctggcctgtaaggtttctgctgagaaatctgctgttagtctactgggtatttccttatatatgacttgactattctcttgctgcttttagaattctttctttgtctttactattgacattttgacaataatgtgccttggagaggatctgtttgagtcgaatctgtttggggttctttgaacttcctggacctggatgtatctctctcctaagacttgggaagtcttccaataatatttcactagatgtattttcctcatctttccccttctgcttttcttctggaattctcataatattaatatttgttcacctaatggtgtcctatacatcctgtagatctttgtcaatctctttcattctttgttgtgtgtatcctatgaatatgtaacagtactatttgtcagtgtattaggccatttttgcattgccataaaggaatgtttgagactgggtaatttataaagaaaacaaggttaattgactcatggttctgtaggctttagaggaagcatggtgctgatgtctacctggcttctgtggagacttcaggaagcttccattcatggcagaagatgaaggggaaggaggcatgtcacatggcacaaacaggagcaagagagagacagcgaggtgacatacacttttaaacagacagatcttgtgagaagtcactcataattgtgaggacaatgccaagaggatggtactaaaccattcatgagaaatccacccccatgatccaatcacctcctactaggcctcacctccaatactggagattccaattcaccatgagatttgtgtggggacacatatccaaactatatcatttggttaaaaaataaagtatatagtacagagtctataaaaaagactggaatgggaagccacgtcaaaaaacaggacttgtatagctgacgttgccccaaatctggaaggtcccccaggactgaggtgggtcctgaggtgttaggaccacagggctgctggtgcatgcagctctgtgcatttataagatgaatctatcctgtactagatttgatgggggatgctctaccttgctctggggtcatatgtctaaatggatggcattatatgaaatttttttcccccagtgctggttccaaacttgtccacaccattaaggtgactaacgtactggataagtctgatgatgaaacctgatggcaagggccttgttttctacccaatacaggctgcagggcaaaccatttacataacataaaagaggtttgtgggaaagacagtatcaaaaagtgtggaggaaggggagatagatggttccagatacaccagctacccatcttcagaggtcaccctactcagttcacaccctttagaaatgcttccccattgcctgcaggatccagtccccatgcccaaccaggaagcagcagggggcttcagcacagggatgaagggcgtgcttgagtggccagtgttgagggggaaaagatcccagagttcctgcctggtgctgccctccctctccttggtcctggctctgtctgtggtcagatctcttgcttcctcctgggagtgtcaggctcatatgcagcctcagtgggcatctggggaagccaggcctgtgtctctccagagtgtggggcacagagaagccaaaacacagcatccagggggaggaagtcacctgccagcagcctgcactgccttgcaacacacggccctcatcccatccccaccagggcccagaaaggcctgactgcagccccgagtggccaagggatgtccaccatgggtcctgggctgctttctggcctgttcttgccttcctcttctctattccctggtctcaggcaccttccctcaatgagcagagcatggtcctctcacctgccttacccttgtgtgcccccctaaagcagggctcctttcccattccaccagctcctgcccaggccccattcccacctcatgtttcaattcaggacctgtactcagccagcacatgtccttccaacttttgtacttttcctctaaaactatccctggcttctcctcctcctacatcaaaaataccgttttatttccagattccaaactctctgtggcccacagtggccatcccctaacccataaggctgccaggacccctcccccaggaggagactgaagtcttatctgggtgtgtttctggggacagagctgaggtgagctgaaggatcctgatgccttctggaggcagtgtctaagctgcattgcttcctcatgaccacattgcttttcagggcagtcaggatactttgtgcaaccttattcaccaagctgcaaccaggtgccatagatatggtgccagtgcaggggctgggtgagctggggcacagagaccttcccagtgggctgaaggccatggcttttgcccttgacaattgccctctgggatcatggctcttcagagagccatgtcaggcatctgctgaggagggctgcacaaggcacatcgaaatggtgcccatgggccccccagactgtgtctggacatggaacccattcatttcatttgctggtcacttgaggccaggaatgctgctgggtgtgtttgacaaggttgtgtgggcaaccctgacttgttctaacagggagtaaagataccctccttggtcatcaccttggaaccatgagaaagcaaattgttaagattgtcctcctccttgtaacataatgaggactaatacgtattgagtcttcctgtgggccagttgctagactaagaactttccacgttttcactattttaatcctcccagtaactatacaagtaaatgctactattatcccagtttactgaagggaactgaagcacagagaggttgagttacttgttccaggttacaaagcatgagattcataaagctggatgtgaactgggtctggctcctgctcttcacactgccctgcccctctttggaccagcattcaagacctggtgatggttactcccaaaccactggagagcttccctgctcgggccctggttcctgggtttgcctggagctcatcttcctgtgcttcccgtggtcagatccttggcccagactgagccaggagcctgagggatgatctgatcctcagggtctgtggtgagggctgcactggacacattccctggatcagcccaataaggaacagaggagatcactgaccaggaaggaaggccctccttgggcctaggttggagtctggatgccgtctctagggtgtgaagagggggcttcaggctgcccatgattgagccactccaggaaggcatagactgtcctggtacatcctggtggtatgttccgggctctgggcccagctggctcgtagttaggagtggcggtgaaggtggaatgtgcttttgagccgtcctgagccctgagaagaggtagagagaggctgttgttgtacctccaggctgaagtctgggccaaacctgtagacattctggtcattcttgctttgaattcagttctgagcttggtgtgacctggggaagggaagacaatggttctgtgaggtgaaagagctcccaaacctgtgtcagaagaggagagagacagaaagagacagaaaatgtctatctttagtgctggggaaagagactcagccaagtgctcgtgctctggggctttgagatcagagtgctccctccctcggagcttcagggaaggcagtttatcagaggcaagatcagagctgaggctcaggcttagaagacagctgagccttggcgtgcaaagttagtagatgcagagaagagccctcaaagcagaggggtgagggagggtgcctgagacatggtcgggtcttctaggggctggggatgtgggtgcctggagcttctgctttcagatctccatctcagcccctgctgtctgcagctgttgtaagctcatctcagctacaaggcccacttggtgagctcttttcatcattctgcccaaagagcttgcttccagggcttcaggtgccaccagcatttccccagagttttcatggtggtaagaacgtggctcatgactggtcctttttgtttttgtaaaaaaataaaataaaattttaggatcttctaaatatattatgccaaaggggacgctaagctctggaaactgagtcatgtagcatgcttgcaattctgcttcttagattatagcttaactctcttcctcgttgttctagttctataaatgactaggagagaccagagatcagacatccctctgtccaatcactgatctttgttatcaattacctgcctcctttattgtcctgtttctgagaccagacggtaaccaaaataccttgatatttacatcttcagtgtggaatgttaaatctacctttcccaaaaagaaagaccacctcaactaatcagaccattgtaagtatgcagtacacctttttaagattttgttaaacatcctgaaatttgtctatatgaatgatcccaaacttctacactttggaatactgacctccattctttggactctgtgctttctggtcagcctatccttacactttgtgcttgaataaactctctttaaattgtattttgaccctttgattattttagattgacgttcggccaccttgaagggactcaaagtgcgcctcaactgatccctcctgttatgtcatcgaccaaggctttggtgccaagatgaatgccttttcattcgcccaacttgcaaggactgacaggaatctctgccatggctcctcttgggtttcgaatctctctaattttggtttgagattcagacattattttagtgatccagttccacatttgatggagctagaattgaagctctgcttttaaggtaggagtttcacacacacacaacattagaatatatatattagaatatatccatatatattaaaaattctgctgttcatggatttgtgatttttacttttctctaaggttgcaggttgcttgttgaactacccttcagagtttgtacgtccttttctctcaccacaattttggtcagggaagaaaatagtttccttctctgaaaagaggaggtgaatgtttcatagcataagaaatatttaagaagtatttaagaaataaatactttttatttaaaaactggctaaacgctgaagcttggttcatttggcgtatgtaaagtcactttatgagtgagcaaaaccaatgagaaactttctttgaggataaagatgagtcctgggataagggaaagttttcttctttgccaaaaggaacctcaagcaattaaggtcttgcagaagtgtttgacttcattgcttgtaacatgcgattgagttcatggcttgtaacatgcgattgtcccccaggtaatctccaagaagaacatgcagtgaagcttgtttaccctggtgggcacataagaagggttgttcttccagtgccgtaagtgctcatgattcctggatttagtgagccatgtaaaagagaagaagtgacacaagagtgacaccttgaggagtaaacccccttaagcagcacaccagatccaaaacatctttccctttcagtctttggtcacttgaaaagataatccatttttttcaagatggcggactagggacattggatgccagatctccttaggaagaaggtcttaagttactgttaaatggacaagttctgaactgaaaacagagggaaaagagccaggacctgtcatcgtgcccatagaaagaagctgaggcatggaaaaggaaagcagcaagagtctcgcagagatcaacccccaaggaactcagagccctgtggaaagtgtaggtgggagtgcttctctgctcttctctcctctgtgacaatctactgaacgcccaacttttggagagcaccttttcgcttttgacccagggaaacactattggtagctatttgagaactccccagggacagcaaactgcttggccagcttgtggaggcatgctcacattgccctcagaagcaaactgagattgtgggcaccatactgagtgtgcattgatggtgctcctaccctgactgagaattttctgcccttgagtcactgtaccaccagatccccccctgctctcactttggctagcatggctggtccccagggagttgtgggactccctggagatctaacccttggggtgggctgcccctaaaggaagaggaaaggaaacacagcctgccaaagcccctcttaggataaagagtatgtgggtgtgggccaactgctgcaggggcatcattgatgactgggaacaaatgttaggaggggtttcatctcccacctcccccaccatacactgttgtggatgcaaaggtggtcgtccctgctagggatggtgagcatgaactcaaggaaagtgctcttcatggtggcaccacccctactgaaagtgagcctttgcctgcttccagctttcatgaaggcaaaggcctaactccctcatcctacacagagcagcagcatcctggcaatggaggatagaccatggagttgcctgccatggactaggggaagaggctctgcttcaggccccattttagtgatattcatcagagaggtatatccacagcccccagccacagtgtggctgggaaccaaaggatgaagcctttataaacagaaggtcatgggtcctgtgacaggggtatcgtaggaaagtggatcgcattcctgtcggctcaggatggggatttgcagcacccaccttttctttgcctcaggacctcaatgcattccatcataatctcttcctggtgtattcagggcgaatgcatccattcagcaccagccagcctgccggctcttactcttaagtgctatctactggacagtagcctgaactgcatgagcaaacaaaaaacctgccaccgcaagggcttagtgccagtccatgaaataagcctcctgagacttccacaccctcagccctgcaggagatactgtgtttgcccttacacccaatacatagctataagaagcaacacctaagaaagccactgcactgaagctatacacaaccaattaacctatacagagccttggtcccctgaaagcacccagagatgaagccacacaatcatatacaacatacatgacagccacaccctcaagagaaaaaaataagtttacaaaagtcccatttaaatgacagaaaattcaaatttaagaagctacggctccctcagatgagagggaatcagcacgattctgacagtacaagaagccagagtgttttggcaccttcaaaggatcacacagctgctagaaatgaatcctaatcagactgaaatgtccaaaatgacagataaagaattcgaattctacacatttgtgcatagaatctgggaatgactattaagatttatttattccctctctaggtaaaatccctctctaggtatataaataaataataaataaataatcagtttcagccgggcacaatggctcacacctgtaatcccagcactttgggaggccaaggccgatggatcacttgaggtcaaggagtttgagaccagcctggccaacatggtgaaaccccatctctactaaaaaaaaaaaaaaatgcaggccgggcatggtggctcacacctgtaatcctagcactttgggaggctgaggtgggcgaatcacgaggtcagattgagaccatcatggttaacatggtgaaaccccatctctactaaaaatacaaaaaaaattagctgggcatgggtggcaggcacctgtagtcccagctactcgggaggctgaggcaggagaatggcgtgaacccaggaggcagagcttgcagtgagccgagatcgcaccactgcactccagccttggcaacagagtgagactccatctcaaaaaaaaaaaaaagggcaaaaacaaattagccgggtgtggtggtgcccgcctgtaatcccaactactcgggaggctgagacaagagaatcatttgagcctgggaggtggaggttgcagtgagccaagatcctgccactgcactccagcctgggtgacagagctagactctgtctctaaataaataaataaataagcaggaagggtaggagagctctaaatatatgcacttgttagcttatatttatgttcagagcctcaggaaatgagcatacacaccaggcttaaattgggtattccaaggatcaggttggggatagggagggaactattttaaaatacatctcttttacatgtgcctttatattgacttaaaattttaaaaattgagatagaattcacataccataaaattcagtcctttaaaaagtatacaatttggtggtttttactgtactcaaagttttataatcacggccactgtctaatgccagaagattttcatcagttcatttctattgacttcttatttctttctttttaaaaaattttaatttcatttcattttatttttgagatagggtctcactttttcacccaagctgcagtgcagtggtgcaatcagggctcactgcagcctttacctcccaagctcaagagttcctcctgactaagccccacaagtagctggaattacaggtgcacaccaccatacctggctaatttttgtattttttgtagagatgaggtctcactatgttgcccaggctgatcttgaactcctgagctcaagtgatccccttgcctcggtctcagagagtgctggccttacaggcgtgagccaccgcacctggcctatattgactttttataacaagcatgttgtacttcggtagtttttaaaacataaaaatgattttaaaaaccaagaatcacagtgatttggcagagcagtgggtcttttctggaaaagagagtcttgcctacccatgctgtcagggttagtcaaatgcccaggctttctggcaagtcagtggtagatttttctctctgctttcatacaaatgggataataaaaatttatcagccattttaagcaactgaatgaaaataagttttgcctttaccattttccttgttcaaaatcctgaagttctagtttcctagttgataaattacatcagttgacattctccataacctggggtcagaatactgtatcattgcccatcaacattattaggttaaatgaaaaggtgtgaaaactgatatcttactgtttttgcaactcttggtttacaacgaggttaaagtttcatcatgtttcctagtcatttgtatttaaaaattttctttttttttttggtgaatggactattctttgctgtttgtccatgacccactgttacggacacgcacctggtagtggtctcagccctttgctgaataaccatttccttccccatctttgtccttagttactgtgtgaattcttatattgtgatttatttccaatgacgtgttgaccttttaacattgagtttgcttccatatttagcgtgtatatgatgaagaagtggaggagccagtactcaaggctgaggcagaaaaaacagagcaggtacttgtataaaatcactcttagctgagtttctgactttgaaaaatgtggtggagatcgatgtgttatgtgggaactgggggatggtgggcggggttgggaaagggagggactgctcctgacagcagcccaagaggggattctttcctttgtttctgaaatgtagtgtattaactaatacagagatcaaatccttgaattctgatataagaatagagtagaagtcagcaaacttcttttgtaaagggccagatagtacatattacagatttggagggtcacagaggtcatttttttcctgtggcttcctgagttacagatggaccagccttcttcctgagatcttctcacaccagagcccaaaacatagctaagaggttctgggtcacactgacttcttagcactccagcagagatttctttttcttccactcaggaaggcacatggactgtgaataagtttattattggagtagctttgattttgttctcatttattcagaaaatatggatcacctgtaaaggttggccctttgtcagcaattattacttgtaacagatgaagctgttagactaggaaaagggtattcgaaaccagctatagttctgcctgttgccagcattttttaaaaaaagttattttattttattttttatttaaaaaaattttttattttgagatggagtctcactctgttgcccaggctggagtgcagtggcacgatatcagctcactgcaacctctgcttcctgggtgcaagtgattctcctggctcagcttcccgagtagctgggactacaggcgtgtgccaccacgcctggctaatttttttgtatttattgtagagacggggttttgccatgttggccaggctcgtctcaaactcctgacctcaaatgatccgccagccttggcctaccaaagtgctaggattacaggcgtgagctactgtgcccagcaggttattttatttttaatagaactcaaggatttgctagccatttaagtgcagtagtatctggttataccaattcagggtttaatttgaaggtgataggtatttagtgtactatttttaaaaactgctatatatttcatacacattttcacaaactcagtacaatattagctatttaactcagaatcaagcatatccaaatagaaaaatacacaaccaagacaaaaaagttcagttagaaagacttcagtacttgagataaaagactaaaatgctcgtagggtttttttttttgcctttggccctcagaacaacactgtgtggtttggttccttctagaatatttgtagagggggaaatgacactaaatatttttcggtatttctcacaatggcacacttgtgtctgcggggactgccattgagaactgctgttgcaggaagaagacacctgagggagattctcagcctgttggtgatatgaacaaaccttttttcttgagtggggcattgttgtagggtatacacagaatagaccggagatgaaaatgacccccttttgatgtagaacagatttataaaataattgtaattgtccagtattttttttttgtctctttaaactgtaattgaaaaatgagacctctgtgaccttccttctaagtcttaacacctaaaattacccaagggataaccagggctcgtgggatagtcatggtgagtctgagagtctaggccctccagcagtggggaaacagcatgcattcattgttgggatacttctccacacactagttgtacctctgcttttgtagacgatgacccttgagctctggaaccttaggtagtttgatgcatgtccagaaaggggcaaacttgggatttaaaacttgcagtcttactccaaagtctgtgtcaaggcattcagcagaatttgacttttttaacatttttaataagtttttttggagcttgaggctaggctttagagaacattcacagtattcttttggggcagtatcagtatattggagacccatactgcatggtatttattttgtaggagaagacacgagagcagaaagaagtagatctcattcctaaagtccaggaggctgtgaactatggcttacaagtattggacagtgcctttgagcaacttgatatcaaagcaggaaactcagactccgaggaagatgatgctaatgggcgggtggaactgatccttgaaccaaaggtgaagacattcaacttaaatatttattgcacaactattatgtttgggctactttaattgggcacacgattagtaagtcatggacttaacctctgggaagtgagtatgtcacttagtagtctcacattgactccaccagaaagactcgctttacctgagcactgatggagtacttgtgaggcgcaaggcaacatgtcaagttggggtgcaaagatgcagagcatggcctctactctcgaggtgtgtgttgcagtctggtgggagagaggagacatacatacgaataaccattgtaaatgccctgagagagaattgacttccagctggaattttggggcaaagatgatatttgaattggggtttgaagggtggggaggctcaaaagagacagagagtgttgggaacctgaaattatgtagcttgggctaaggaagactgcagaagaactgaaaggcatttgggttgtttccggtttgggcaattattaaatacaaatgaagctgctgtgagcattcatgtccaggctccctcatagcctagtgagtgttggttgcttgacagactttctcccacattgttcaaagagacaattggggtgacacagagtctctcggtagtgaacacagaaagttaccacagtgacacacaaggccttccgaattaaaacatgccacagaaccaaacccttttttttttttgagacggagtttcactctgtcctccaggctggagtgcatggcacgatgttggctcactgcaacctctgcctcccgggttcaagcgattctcctgccccagcctcccgagtagctgggattacaggcgcccaccaccacacccagctaatttttgtatttttagtatagacagggtttcaccatgttggccaggctggtctcgaactcccgacctcaggtgatccgcctgccttggcctcccaaagtgctgggattacagacatgagccaccgcacccagcctgaaccactcttctagtcattctgtagctgcacatttctcttccagtttgagctttgctgagtcacaccaaattgaggcagatcatttggcactgaccggtacacttgctgcttggattttcactgtatgcctttaaaagtcagcagtggactctgggaaatggattgcctggaccacacttgatacttccaagacacacagcactttctctctttttttttccccttgcagaggaagttgtggaggtacacttttcttttgtaggaggatttggggatgtcttctgagtcagtgagaattagtccaaattaacgctgtctttgccttatgctccattggttgctgtgacgtcgttgaacctttactttaaccttcccaatctttctgttgttgtgtgaaatgtcagaattattctcccctgccccagagtcctttgacaaggaagagatatcattgccaaagggcaatgcctcacaggggacagggcagcatttccttcagcagtggaggtaggaggctgtgcaagggtggagcactttcttgaccctattttttttttttttttgagacagagtttcactcttgttgcccaagctggagtggcgcaatctcggctcactgcagcttctgtctcctgggttcaagtgattctcctgcctcagccttccaagtagctgggattacaggcatgtaacatgacacctggctaatttttgtattttttagtagagacggggtttcaccatggtgaccaggctggtcttgaactcctgacctcaagtgatccgcccgcctcggcctcccaaaagtgctgggattacaggtgggagctactgcaaccgaccaaccctaaatttttaatgtgtgtgtggtgtgggactgacaggagtagacggctgacatgggcagatctccagcatgtgctgttggggccacagtctcctgccctcactctgttttctcatctggtcttattttaccaacttcacttttctaaattcaacagtgtggaaccactagggggtattgttcttctgtttattgagttataatcttttttatttatttatttatttatttattttgagtcggagtttcgctcttgttgcccaggctggagtggagtgatgtgatgttggctcactgcaacctccacctcctgggttcaagagattctcctgtcttagtctcctgagtaaatgggattataggtgtgcgccaccacacccagctaatttttagtattttcggtagatattgggtttcaccacgttggccaggctggtctcaaactcctgacctcaagtgatccatctgcctcagcctcccaaagtgctgggattacaggcatgagccactgtgcccggcctaatctatttttatattaaaatatatagttatattatgtctcattagtactgctttttaggggacagctcaccagaatgttcagtttctttccttggtcctcctcttcttggaccttatactaggaggttgtacccttttccctgtttgcttgctgctgatagacttttggtaggcttttgccatttttgttaaattttgttaattaggcccttggggagggagattctgtgtgatacagctttactttggcatcttttttttttttttttttttgagatggagttttgctcttattgcccaggctggagtgcagtagtgcaatctcagctcactgcaacactgtttcctgggttcaagtgattctcctgcctcagcctcccgagtagctaggatgacagttacccgccaccatgtcccgctaatttttttggatttttagtagagacggggtttcaccacgttggtcaggctggtctcaaactcctgacctcaagtgatccacccgccttggcttcccaaagtgctaggattacaggcgtgagccatggtgcccggccttaccttgacatctttacctaggatttgacttttaaaaaaatcagtgaaaaaaagaattttttttttaacttttagtcctgctgtgtttcttattctccaccttcgttatgtagcttgtttgggatagtcagatggaacagggtatcaggtggcacatgtaagtttgttttcaactgaaatgtttgacagcctattcctttcatgatgtacaggatctatacattgatcgtcctttaccatatctcattgggtcaaagctgttcatggaacaagaagatgtaggtcttggagagctgtccagtgaaggtacttttcttcaccaaataattttgttccttaacatttcttttttattttaaaataatttcaaattttacattaaagtttcaagaatagttcaaagaactctcatatacccttcacctgggtttaccagttaacatttcaccacatttgttagattgttctctacatatacgtaatattttgtcttgagcctatttgggagacatcgtgctcatgccctgttacttctaaatgtttctctgtgtgttttctttttttcttttctttgtctttttctttttttgagacagagtctcgctctgtggcccaggctggagtgcagtggtgcgatctcagctcactgcaacctccgcctcccggatttaagcgatttttctgcctcagcctcctgagtagctgggaccacaggcgtgcaccaccacacctggccaatttttgtatttttagtagagacggggtttcaccatattgtccaggctggtctcgaattcctgacctcatgatctgcccgcctcggcctcccaaagtgctgggattacaagcatgagccaccgtgcccggctgtttttctttctttctttctttctttttgagccggagtttctctctggtcacccaggctggaatgcaatggcgcgatcttggctcactgcaacctccacctcctgggttcaagcaattctcctacctcagcctcctgagtagctgggattacaggtgcccaccaccacacctggctaatttttgtatttttagtagagatggggttttaccatgttgggcaggttggtctcgaacgcctgacctcaggtgttcctctgtgtgtgttttctaagaacaaggacatctcttgtataatcacagtagaattacaaagccaggatattttcctggacataagggtattatccaatctgctgctatgttcacattttgccgtttgtcccagtgacaccctttacagtctctctcttttgttctgtggtccgggactcaatccaggaccagccaccacatttggttgtcaaatcttcagttatcttttaatctgatgccatttctcagcctttctttgctttttatgaccctgacatctttaaagagtacaagcaagttttttttttatttgtaatgaataatttttggggggagagatacttcaagactacataaatatgtaattcctcaccataatgacactttcaattccagtaagtgggtatagatggttttatcaagatctctgtgatgctgttgtatggtggtttgtgattttgagctaaggacattttcttgtgaatattggtgtggtgacccttatctctcttctcaacagaaggctctgtaggcagtgatcgtggcagtattgtggacactgaggaagagaaagaagaggaggtaagggctgtttggtatgaccaggtcacggtgggcagcaagcttaatttaagatgggcctagcaggctaagtaaatagcataactgtgaattcgtaatctgcttccataaagcttttaacagtgatagaagccacattctgagttttttttcccaagggttagatttcctttttgccttatgtacaataatagggaaagctgctttcatctcttccactattatcctctctcccaccttgccaccaaatatctctttcacccaatatatttttgagaagggcagcttagatgttttggtggaatctctgcctgggatatagtctttgagtatattctgtctttgaataattctaagggaaaaaatctacatttagaacttttgtaaactataaaacctagagcaggatataccgaaagccaccacttacattctattttgctgctgccgctagcgctttcatatccacagagcataatttcatttccttgtctagagtttgagtctgtgggccttgactacagttgaatctgtagttgttctttagatgggatattcgttattgcaaaggacacagccatgttgcaggagagtcctcgagtatgggatttccgaaaggagacagtgttgtgtatgtgcttttctcttctggttggtccccctttctgcactctccctgcccgcctttcttccagtcctccaaagaaaaacctgacagcaggaaatgagcttttcttaagtaactttcgtataacaaaagcagtgctcattaggggaatcccttgcttttagccaccgatgtggcacttctatgtggcacttcatcaatagttgcttgtagcaactattgatgtccccttcttgggcctaatgaagtagttatttttattattttttttattatactttaagttttagggtacatgtgcacattgtgcaggttagttacatatgtatacatgtgccatgctggtgcgctgcacccattagctcgtcatctagcattaggtatatctcccaatgctatccctcccccctcccccgaccccaccacagtccccagagcgtgatattccccttcctgtgtccatgtgatctcattgttcaattcccacctatgagtgagaatatgcagtgtttggttttttgttcttgcgatagtttactgagaatgatggtttccagtttcatccatgtccctacaaaggacatgaactcatcattttttatggctgcatagtattccatggtgtatatgtgccacattttcttaatccagtctattattgttggacatttgggttggttccaagtctttgctattgtgaataatgcaaggaaatagagacagtatagtccaaaatgtaaaataacacaaactgactttcagtaatttagttagttaaatgtgcaactctttaaatccaaaggcaagagttgaaagtgcaggtgatgtgaacaaattgttagaggcatttaagtgaaccacaaaaattacatgttaactggaacaacccttcacaatattgccagctacccagcttatctgcaccttgatacttaaggtgaccagtagtcagtacaaagagactgagtgtcagagctttttctccacttgacatagaatcagcctgccccagagacttagacctgcaatcatttctgtgcttctaagtaaagcccatttaacaacaaagccttttcttccccacaaaggagtcagatgaagattttgcccatcatagtgacaatgaacaaaaccgggtaaggctcatatattgaaatgactttgtttttacattttaattgaagcatagtatatatactaatattactttggaatgatttatgaccaagtgaggattttttcatgtatacaatttattttcctttaagcatttcatgtatttaggctaactacctcctttgtatatattttttccaattttgctttatagtttatttttcttagaaaagaagtttcaaagaagtgaaaaacacaattggaaaacagagcctctaaaagaagactcagttacccaaactgaactactttgcatgagtccctcttctgttttaaaattggagacaatctagcagtaacattattgagtattcacaagatgaaaacttcttaccctactgtcttagcacggttatcttaatttttgaatagctaaaggcgtattcttttcatagtgtgcatctttcattttctgccattttatgttaacattttataaatgtatccttatttattattattatttttttgagatggagttttgctcttgttgtccaggctggagtgccgtggcgtgatctcagctcactgcaacctccgcctcctgggttcaaataattcttctgcctcagcctcccgagtagctggcattacaggtgcccaccaccatgctcagccaactttttttgtatttttagtagagatggggtttcaccatgttggccaggctggtctcgagctcctgacctcaggtaatccacccaccttggcctcccaaaatgctgggattacaggcgtgagccaccatgcctggcctccttattttgaatagcctttgcagtttgcgttgtaaacttctatacttttaaacatactgagtatgatactgtcatagtctctaaatgtataagggaaagagtttatttctagagttgtatttttgatgtaataatgtattcaatattttcttttcttttttttgagacagagtctcgctctgttgcctaggctggagtgcagtggtgtgatctcagctcaatgtaatctccgcctacagggttcaagcgattctcatgcctcagcctccctgagtagctgggactatgggtgtgtggcaccatgcccggctaattttttgtatttttagtggagtcagggtcttcccatgtttcccaggctggtcttgagctcaggcaaaccgcccacttcgccctcccagagtactgggattacaggtatgagccaccacgcccagccaatattttcatatatagaaatcctttgcttcggtgaactgtttcttcagaatgaggtggtatagagttatgttaataactcttaatgtctgggggacattctaaattaagtattatgcatgtagattttcctacaatctcatcactggggtgattattttaaatttcttttagttaaaaatttgcatttaaatttcttaactgggaaatatttttttcacaaaaatgtttaactatcaaatgaaggattttatactttctggttgttactgtattttcctggttgtattcataaatgtggttgatctctataattttaacgatcagtctttcttcataggatatttgtttctatggaatttcctattaagatctgtaaatgcaaacagtttttctttcctttttttttttttttttttttttttgagacagagtctctctctgttacccaggctggagtgcagtggcacgatattggttcactacaacctccacctcttcggttcaagtgattctcatgcctcagcctcccaagtagctgggattataggcatgtgccaccatgcccagctagtttttgtatttttagtggagatggggtatcgccatgttggcgcggctggtcttgaactcctgacctcaggtgatccgcctgcctcagcttcccaaagtgttgggattacaggcgtgagccaccacgcccggccacaaacagtttttcaaaaacagtacagtatagtgagtaaaagcactagcttatgcaacaggttggttttgtgtgctgcagctaacctcaaagttgtaaggattaaattagataataaagtgcttttagtaacatgcctggcacagttcattgattcaaacattgaaaaaaaatttttttaattatacatagtagtgtgtacctttggaaaaattagaacttaacagataaggctaagtttgagccttccagtcctttccttctctgcatactcttcagaggtaactgggatcatgttctgggagcatgtcattccaagtctgtttctttgcttttataaacacatctgtttccatagaaatgctgtagtgtttgcagagggggcggggcgtggtatcatcctggatttgttattctgcgcttttttgcttgacctaccttggatggctctctagtcgttacagcttttaccttttaactattactcagtattcttactaaggtaagactatgctgatgatgtttatatttctctagtaaaaggctgggcatggtggctcacgcctgtaatcccagtgctttgagaatgtaatcccagcgctttgggaagctgaggtggttggatcacctgaggtcaggagttcgagactagcctggccaacatggtgaaaccccgtctctaccaaaaatataaaaattagccgggcgtggtggcgggtgcctgtaatcctagctactcagagggctgaggcaggagaatggcttgaacctaggaggcggaggttgcagtgagccgagatcaccccattgcacttcagcctgggcaaaaagagcgaaactccttctcaaaaataaataaataaataaaaatatttctctagtaagccatttttgatattttaatattctgctttttatattcttgttgttacattcttataaaggatacatttttaggccgggcttggtggctcacgcctgtaatcctagcagtttgggaggctgaggcgggtggatcacctgaagtcaggagttcaagaccagcctagacaacatggtgaaactccatctctactaaaaatacaaaaaatttgctgggcgtggtggtgcatgcgtgtaatcccagctactcggaaggccgaggcaggagaatagcatgaactgggcaggcagaggttgcagtgagccgagatcgtgctgatgcactccagcctgggccacagagctagactccatctcaaaaaaaaaaatatatatatatatatatttatatatatatatatatttatatttatatatatatatttatattttatatatatttttatatatatatttttcttagattcaaagtaaatcttgtgtattatttcttccagcacatcttttgcttcataacttgctgcatcatgtttatgattattattttaaaaagctgttacttctttgaaggaggagcctaaaggctgacagtatctcttctttagcttaataactagtagttctaatttggtattttatactcttagcacaccacacaaatgagtgatgaggaagaggatgatgatggctgtgaccttttcgctgactctgagaaggaggaggaagatattgaggacattgaagaaaatactagacctgtaaggaaggctgtagttgctatcacttggcagagttttagaaccaatgacttgtttttctttttattgtgacttactttgtacatcactcattttggcatatttgtcatttcatttacactttggaaaataatggcaagcatctcaaattgcctcacaagtaccactttcttgtccagatgttatgattttatgagtcagatcattcagaatatgtctagttctagagtttgaagaccatagtgctcctgtctctccatccattcacctttttcttattttcgtatttagatttttaagtattaaagtcaagtattaaaaagaataaggaaataaagggcatctccctttgaaggaacattttatgagtcctattccttgggtgagctgtatagggtacatatgtttaaattcatttaattaaactctgttttctcctcagttcaatttctttgctcttgtatacataatgttgttaggtgtccaaagtgaagtgtactagtttgttacaaaaaagcgattcttttgatttctcctgctgtagaaaagaagcagacctacatcgtttgcagatgagctggctgcccgcatcaagggggatgccgtgggtcgagtggacgaggagccgacaagtgagccccagccgcgttgatggggagtagggggggagtagtgcagggccctctgctggcttcaccaaaggcggatttctctttttattagtaattactacatatatttattagtaattgctacatataatttaaattgtagcgcttattccttttttggttaatgagctcctttagataactgaacactgtggacccacaagaaaaacgtacatgtacacatgtagataaccctttacatataatttcaggggattaatagaaactccagagaaccatgggcaacagcttaagaattcctggctgaatatttactcctatattttgaacacgtaagaatgtgctatatagcatattctagttataacagggtagaaagataacacaataattctttcaacaaatacaatcctgttatgcacatgagcctggtacgaaagcagaaggcttctgccttacaaagagactcttgagtgcccactgtgggcaaggccagggggttcagtgctctggtgcagctgagatgaaaggcagatgtcttgctcttagctgtgagttataaggatgacagacgtggaaagaaccaggatgtgtatactgagggaggacttagtactattaaaactgtgaactgttcttcaagccttaccctcaggagaagcaaaacctcggaagacactcaaagagaagaaggaaaggagaactccttcagacggtgggccttttccctcaattctgttattttaggagcctgttgactaaggaatgttgcttacataattcatgaagtactgctttacatgctgttttccctctgacaaatgggtctgtctccatttacttttctaaagcctctgggctgggcgcggtggctcacacctgtaatcccagcgctttgggaggctgaggcgggcggatcatgaggtcaggagtttaagaccagcctggccaacatagtgaaaccccatttctactaaaaatacaaaaaattagcttggcatggtggtgggtgcctgttgtcccagctacttgggaggctgaggcaggagaatcacttgaacccgggaggcagagattgcagtgagccttgatcgcgccactgcattccagcccaggtgatggtgcgagactccatcccaaaaacaaacagaagccttggaaggcatgttttggggtgctgggaggatatgtgggtgtggagtaaaaattcctgtagagatttgatttattagattttacagcaatcatttcttgtcttcctagaattcttagaagtatagaaacttaggaatctctagcatttgttttcaataaaggatacaccaggcctttttctgcaaacagccatgtccattacattagacttgtccctgtgtcagtttgcagatccctttgtttattctgcccttccttcccccagattggttggggaatgggtcttgaatgtggcgtctgacccgaatgcttgcttcagagtaaatctagatccagggtgctggcctagagaatgaatgctgtctgccgcagacatggacagacttgagagtggaggcccagagagtcttttgagggtgtcagtggactgtgccaggggtttagtgtgaaattcatcagactgcctcacactttgttaaatagtgtcagataaactccatgccagtttggagacacagcagatgccaacccgggaatttgagttctggccccatctttaatactccctgcaaaacattgctttctgtttgctagatgaagaggataacttattcacaccccccaagctgaccgacgaggacttctcgccatttggctctggaggtggcctgttcagtgggggcaaggggctatttgatgatgaggacgaggaggtgagtccatggcacccagcaacactccctgcagctagctgtgtcaggggtccacagggaagatataggctttgcttgtttagtgggggaaaaacagtttctcagttggaagttgcttctattttcatattttgggacattttgaactaagaatcacagagtgagaaatgccgtatccttctatgctttgttaggtgaggagaagatgtgcacgtgttaatgtgaataatttactaggtgattgtttcttgccttatctgttgtcttccacgtttgtttttaattcctggacaggcctaaattattttagggtctgatttttccatagttatcactttgcaactgattttctggcagagtagtaaatatgtagctttaaatcttgtaggttatttttccttaggaatcctcacatgcagctatgctttctcctggttttttgaattctttgtcatataccttatttcaaccagagtgacctcttcacggaagccccccaggatcggcaagctggagcctctgttaaggagggtaagctggggttgggcagctgcgtctccgtgtgcagagttccaaaactgtctttctcactaggagatggaacaaggttgttcccaagccttgtttctgtgttaagcaggaagctgttgtttttactgtggtcctgttgaaagtaattcatcttcactaattcatgtcttggaaaaaacagtaccatctgtaaacccataccacagtcttgcctctttgttaggagagaactcatagaaagtcaaacaagaaaggaccctagagcaatgttgaggatggttttcattgaatgaagtttaatttaaagaaacatttttaacattctgtatataagttggagaccagtaattccccaacccagtgtgcattaaaatcatctgtgcaggtttttttgtttttttgttttttgtttttgtatttttagtagagacagggtttcaccatgttggacggttggacaggctggtcttaaactcctatcctcaagtgatcacccgcctagacctggcaaaatgctaggaatacaggcatgagccactgcacctgtccccttggtgcagttttaaaaaaacacaaatataaatatgttttttaacctacaaatgttactccataggtttgtggtagttcttgggacttgggaattagtgattctaagtgccgagtctcccgggcacaggcatcagagctgggccttggaggccgctccttgtgcctgctgtgcgggctgctagcctggctctcctctgctttctgctgtccatgttttggcatcagtgacttgcttggtttccccctttgctcttatgtctttatttttttactgatgactcacatgtttttgcggttctttttcacccgttcattctcatccaactggaatgggtagaggtggaactgtttgggggagccccggtcatgctgtccctgcctctgctgtgctcatctcctcccttggtgtccccaagctgacccactgctgtggcttgatgacggtcagcatgctcttccattggagtcacagctcagattgtgttaatcccaaaaaaaaagtcctgacatcggtagagaagaaaatactaaagaattttaaaatgacttgttcaggaaaaagtggtttcaaaaggtctgatactagctgtgttttacattgcacgtatttcaggaagaaaatagcaaggaaagttatttcccttgtaaaatggttaccccttgctttctcattctagagtcttcatcatccaaacctggaaagaaaatcccagcaggagctgtttctgtatttttaggtaacataacttaggtttgttttctaaaaactacacaaatactgttttttgcatttcaaaattatcatcttctaaagtccggctggagatgaggaagtacctgggagcttcaaagggctttgagcatcttatagaaagagctcatttactgatattagctcttattctcctagagctcagtggccttggacttttttgtgtttgagctgacctggtgattctccgttgtgagatgttctgtagcagtaatggatggaggctattgggccctgttatgcattttgtggattaactgaaatggaaagtttttggtgggtgataatttttttctgtaaattcaaccggcccacactggctcacagctgtggctgtcttgtctctccacccacaggagacacggatgtgtttggtgctgcctccgttccatcaatgaaggagccacagaagcctgagcagcccactccaaggaaaagcccctatggtccccctcccactggcctctttgatgatgatgatggtgatgatgatgacgactttttctcggcaccccacagcaaaccttctaaaacaggtatgtgttcctgcctccgtttctaggacttcagccagaaaaagaacgttgcctaaaaagaacataagctcacctagttctgtatctcttacagtgccagaatcccttctccagcattcctgtcattgagttgttgtgtctgtacttacataggtgtggtgcctgggaggtctgttttatgacccaatcttttctgctctgtaagctaattactatgattattttccttatagagagctgaaatccttttctgtataatttttgcttgcaatttccagttctgacctttggtattgtaaagttttaatcatcctttcttccagccgaccttagtcaattacatgagcagcaggttgtgtgccggccatttatttcccagcttctcatttctctgccaaaaagctcaggtggccttggtctttcctcagatgatgttttcatccccttggccactttggcattctcctctcttttcctcttaaatgtaagtcctatgtcctgaagtcattcccataaatcatttgtttttaaatgtgcagatgaatcttccaggggcttttgtcaaaatgaagattccgattcagtaggtccagggtggggcctgagaatttacatttccagcaagcttcatggtctgtagatcacacttcgaatagcaagacttagatccattgactgctcttccagaaaagaaaggtagatccctagatccctaaggtgcacatgattttcagcaactttaaaaaataaaaaaggatggcataggaatggatggaactagaatgcatttagaagccggctgtctggactcactctcttccagtgttaggtgtagaaagtaaggatggaagccgaagtgtgagggaaaacgatagcctagttaatctagaaagagtgcaaacggatgcagaatgcacacaggtctcagtgaagatgacaatgcacacaggtctcggtgaagatgacagtgaatgaaggtagtagtgctttttgtagctccacagggctcttacttagtggatatctttgagaactgatttagaatccctagtaaattgatgctgctttctttgacaactcctagtctcttcagacattcatgagtcagtgacctcatttcagcaacacatgccctattcggtacagcagtgcttatggtgatgaaaggttggaaaccacccaaatacttatcagtagagtaagctatggcccttctattcaatggactattctgtgacagttaaaaagaaaggggtctacgcttgttgacttgggaagattttgtaggtacattgagtggaaaacacaaatggtaagacattgttcaaattatcttcttatttatagccttatttataaataactagtgttaattcattagtacatcctttgggggaattagaagcatgtatgctgaactgttcccaatgttcatcttgtttgagtagactggtggaattatgaggggatttcattatttgcttttatctgcttttgtacagtttgattttttttaaaacaggagccaagccttcatttctcagattccttagatgattgacttggtggccctcttaaatgatctttcttcctctagatctctcttcaccttgtaagccagtccaagctactctaagtacaggaaatggctgcttggataagcatgtcagccacgtggataaactatctgttctgtctttcaactgaactgctactacgcactttgaaaaattccaagggaagagtatagttccacttactatttctttataactaatcaagaaacaacataactttttatgtttattctttgggagggaagaattttttaatctgtgaattttgtgataggatgtttgacgttagtgtcattttatgccttggtattttttacaggcaaagtccaatccactgccgatatctttggtgacgaagaaggagatctgttcaaagaaaaagccgtagcatcgccagaagccactgtgagtcagacagatgaaaataaagcaagagcagaaaaaaaggtgagcaggagggaagacttaacgcaggagcattgatctgccgcattttaataattcatcctgaacccagagggaagtgctgttccctttcacgttcatattgaagaacttcaaacagaaagtggaaagaacattgcagtgaacacccaaataactgccacccagattgatcagttcttagggttttggcaaacactttatggatgtaaaccttgttacatatctatttttttcctgaactatttgcatgtaagttgtttgaactgtttgctgcatggaactgtttccatgtagtcattgtgacattctacccctaaatatttcattaagcctctcttgaaaagacttccatataagcgcaatgccattatcaacagctgtgagactaacagtaattctatagtagaatctaatatctagtctgtattagaattgctccagttgccccagaatgtctttgtaaaatcaccccaacaaatagaatacagatttaaaattatctcgcatatagttcatactgcaatttcctctcttgtccccaaaatgccatttacagcagtgatccccaacctttttggcattagggacataaggagagtgcaacctgcaatctagatccctcgcatgcacagttcacaatagcgtttgccttcctatgagaatctgatgctgccactgatctgacaggaggaggagcttaggcagtaatgcttgctgctcacctcacctcctgctgtgcggcccggcttctaacaggccatggactggtctgcagcccagggttggggacccctgctttatagtatttttttatgttttgattttttttttgttctaagaaactcaggattcggacagtgtgtctgcattgcatttggttgtcatgtctctttggtctccttaatctagagcaacacctcccacatctttttttttttaatatccagccacttgtattgtagaatgtgtctcgtgaatttgcttgattattttcctatgaatagattcagggtgagaagttttggcaagaatacaagcaggcagggttgtgcacttccagttggatcacctcccaagacacatcaggtccactgtctgcctcattcagacacgtttgtcacttggttgttagggtgcccaccacactgcttcattggaaaggtaccctgttctcttttgccgttgctaagttgatctctaaagcgatagttgaacacagtgtgaatacctgttctctcccagccttttactcagtgttttgaaaatccactgatgatcttttcttgactcagttaatctgttagcgggcacaaaccactatttttttaattctatattttttattagttggcattcttctgaatgaagttctttctctccctctccttccccgatttttagtattgctttgggatcatgtattcattcttcagtgtagatgataatccattaccatcattcttcttctttttttttttttttgtgagacagggtcttgctctgttgcccagactggagtgtagtggtacaatcacagctcactgcagcctcaacctcctgggttcaagcgattctccagcctcagcctaccaagtagctgggactatatgcgtgcgccaccatgcccggctaattttttgtggagacgggttttgcccatgttggccaaaccatcattctttttgatgctcagattgacctgcatttggccagtgtgtgtgtccccagcagtctttaagcccttctgactgcttgacctttcactgctgtcctgtacagctggtccctcctctttctacagttttgtctctttgtgtcgtgtcctggctgtgaagccctgactttctcctgccgaccacctaaggcccagcattcagaacctgtcaggcccgtcaggcagcctgtctttccatgctgtctctcattgcatatgtcccatctgtgcacccattgacccagactgtgtgtcctgctccctgatacaccagatgtgtcctctgtttgtcttgctgttctcttaacagccccctcagcttgctgcctatcacagcagagactccgtgcgttttctcgattgattgagtaaaccctcttttctgggtatcttacgtgttaatgcttaatttttctttttctttttttcttccccaccaccccccccacccccgacaaaggttaccttatcttccagcaaaaatctcaagccctcatcagaaacaaagactcaaaaaggcttattttcagatgaggaggactctgaggtatggaattctattgcttagttgtgggtattagtctatggatatgacctagaaactatttttgaatcaggtttttctcaatagagttataagactttttgttaagtactccagttctttaaaaattatctctagaggccaggagtagtggttcatgcctgtaatcccagcactttggtaggccaaggcaggcggatacctgaggtcaggagttggagaccaggctggccaacatgatgaaacccagtctctattaaaaagacaaaaattagccgggtatggtggtgcgagcctgtaatcccagttactcagaaggctgagataggagattcacttgaacccgggaggcagaagttgcaatgaaccgagatcacaccattgcactccagtctgggcgacagagcgagacttcatctcaaaataaataaatgaataaaaaataatctcttgagagcacaggggctttagaaagcaatatgtttacaatacttttcactttgggttggactgtatttacatttcctgggatgaaaatcctctctctttaggatgctcagattttaaactgttcatgggctcatgatgtgatgaggagcttgcaccagagtggaggtcaccatgctacttcctttattcacattctcactaactagaccatgccttaacgctgtagcagatgggttctggcatagccatctgtcttgtcgagactgagaccactaacagcctctgggaccctggttcataggttgctttggtccctccaggcaccttagaaccacctctcagaatttcactgcttttcctgagtctctcaggcctaggtcgtcttagatccaattttaagttggccttttaggagatcatagaactgtatgagattgtaatgggaagtaataagccccttttacagaaaaatatgtggacatggcagaaacttacatgtatttcaagaaactgtgggctctagattaggctgtcatggttgggctttgcactcacagcaaggatgaacatggaaccctttggaagtagagtgattgcccttgatgtaaagaatacctttgaggctatcactgaaggcgagtgtacaaaacgtaggaattaaccaaagtccagttaagtcacaaccctgacccctgagaaacagcatgatggggcctccaccgtcttatgctcatggatcccatgtgtcacccacacctgcacctcagggtctttgcaccggcccctgccactctgaggaatgctgttcccagaatccagcttgcttcctcactcttcgatttctctgtgaggcctccctgatgaaatacacacagcaggaagcctgctagcacataccacgctgtgctcctggtcctctttcctatttcactgtttaccacagcacgtgttgccagggacagtgtatatttacttattcattgtctctacttcccactaaagtacgtgccatgagggcaggactttgtattccctatttgtatccctaacaccccgtccttaataccagtgcttggcatgttgtaagccatccagtaattgttgattagacaagaaaaccaaatgtgaacaatttcagtgacttacgagatgttctggttatttgttgctatgaaacaagtaactcaaaaacctagtggttcataacacccatagttttgttgtctcacagttcgagaggttgactgggcttagctaggccattgtcactgagggtctcttgtgtctgaaggtggctgggctgagggtcagctcactcatatgtctggtacctgggcactggggcccctgggacatctctcactagccctgtgtggctcccagcatgtagtcagggaagccggtcctcttacatgctggctcagggctgtaggggagagtcctcagagagagcccgatggaggccatgttgccttctttgttccagccttggaagtcaacggtgttccttttgcttcatttgttggccaagatggtcacaatggcccatccaggtttatggggagaggccataggctccccttcttgatggtgggagtgtaaatgtactctcagacttgtgtgaaaaccctaccaaaggctttgccccatgtgtgtcatcatagagcgaatgtttttattggatattgttcagattctaaggcaaggagaggtaaaactaaggcagtctaagtaagagttaaagctttggacccgaaggaatgcgtcctgactcctttctctatatctcaagtgtgaggctgaagcttgccctgtggtcattttgggggaacatatttgaggtaatggaagtgtcttttcttgcagtaccaagaaaggtatcagttaagggtccgaaactgtgatgtcgacatttgtttttgttctttgctttggtttactttcattttcttagaacagcagaaccctttctcttgccattgtgtaacatgcaggagggacacgggatgcctggaattccccttgtggcctcttctatctaaataaacccatgggactccggggagcacaggggaaaaacactgtgtggaggagatctcacttagtgaactcattaggtctatatttaggagtagacagcgaccccataattaaaaaaaaaaaaaactgtccaaagaggtcttagaaatatcttcttgtcctatttaattgttcggctcttgtgtattgaagtttatcttcccaagggaatagatgtcccattttatgtttctacttcatgtaggtcaacttgcaggtctttctttgcaggataagctgatgttttataacattttgaaaatttcttgatttttatattttttagctattttgagatgaaattatactctttttgcctaggctggagtgcaatggtgggatcttggctcactgcaacctctgccttccgggttcaagcaattctcctgccacagcctcctgagtagctgagataacaggcacccaccaccacacctggctaatctggtatttttacaaaattaatataggctggtcttgaactcctgacctcaggtgatctgcctgccccagcctcccaaaatgctgggattatagacatgagccacagcaccgagctgaaagtttctttagaatctatcaggtcttatcctggtttgcaatgtcatatacctatagttaagctaagtagactagcaaacatttaaaaataaagtttaatttgtatttatttaaaagaaataagtcggccgggtgtggtggctcaagcctgtaatcccagcacttgtggaagccgaggcgggcggatcacaaggtcaggagatcgagaccatcctggctaacatggtgaaaccccgtctctactaaaaatacaaaaaaattagccaggcgtggtggcaggcgcctgtagtctcagctactcaggaggcagaggcaggagaatggcgtgaatccgggaggcggagctttcagtgagccgagattgcaccactgcactgcagcctgggcaacagagcgagactccgcctcaaaaaaaagaaaaagaagtaagtcataatcttaggagagaagggtgttactaaataaaatagttgtagctccattaatttgggaatctagcccctgtttctttattgaccctgtctaatctttgattctttagacggtaatgggaagccatgcttatatatttatttttttagcatggtgtaggaaattgattcaaaaacttattcctgccttctgtcattcaggtgggaatacagaagcccctgggctctgcgaggccaccagatcctgtagctctcctcctccttagtgccactgcacacaccctgcacagaccctgaggcctatccctttaaggactctgtctgagccaccttccctctcaggaaagaagcctagacacatggcagctgtcatgtctgagtcacttgtgttttatactgacctgatattttaaaaactgatattcctgttaaccagcaactttaatttcaatccaacaggatttgttttcttctcaaagtgcgagtaagttaaaaggtgcatctctgctgcctggcaagctccccacgtcggtttccctgtttgatgatgaagatgaagaggtaaacattgttattgtaacactagataatttagattaggagaaaacggttgttgatgtaactttctacccagaggctcatatactagcaaaaggtggtagggaagcagtcaggccacctgaagtttatataacaaaaatatttctgtttttatttcagtgacttcttccttatattttcctagctgtgcaatggagaagacattagattcttgatgcagttctttttttttttttttttccgagttggagactttctctgtcacccaggctggagtgcagtgatgcgatcttggctcactgcaaccgggttcaggtgattctcctgcctcgacctcccaagtagctgggactacaggcgtgcaccaccactcccggctaatttttgtattgttagtagagacagggtttcaccatgttggccaggctagtttcgaactcctgatctcaggtgatccgcctgcctcggcctccctaagtgctaggattacaggtgtgagccaccatgcctggcttcttgacacagttcttatggagtgaaatctacaggttttatttttagaaatctgcctttgagaaatacaattgaccctttaacagtgtggaggttattttgacttccacattgcagtgaaaaatccatatataacttcttacttcccaaaaacttatctactgatagcttactgttaaccagaagcctcatggataacataaacaggtgattaacatataaatagtataatatctatttatatatttttgtattcctgacatatccagcttttccttattttttttatgatatttctaggccacatggtttgtctgcaagatttttcaaattgttgcaaatgtccaaaaaaattttcaacatattactgagaaaacatttgtgtagaagtggacctgtgcagctcaaacctgtgtcattcagggtcagctgtactttagtctagaggatggatcaacatatacccaatgacctacaagaatgttttggatcaagtggagatacaaaggagaaggcagccatgtcctgaccattgtctttctttcccatcctggctggagagagcacagtggggaagagaaataagagagaagacaacccaaaccttaactctcatgcagtactgggcggtggtgagctcaaaggctttgccatcagacccctgggttcatatcccagctccaccacttgcaaaccagggacctggggcaagtaacttaaccttccttaagctcatgtggcttaacagtgagtagggtcactgtggcagctgtaactactagtgtgaagctcttgcagagtgccggcacataataagtgcatagtgaatgtgagctctgtcattagcatccccaatggacaccagctcattattctcctggcctgtcctacattaccgcactctccttaaaggagacttcatccaggaagacactcccttcatccatcttcacattccagggctgttcacctgagtttgtccatcctaactcagattcaggccctctgatgcttttgttccccttatctgaataaaagcaccttaataaatataacttttggggagtgcttgaccacagaagaatttacaaatgccattaaacttagtacaccagcaattttatttagtaagctatttctccactttgtataatctctttgaaactaatgagaaacacaagtcatgccttccctccatcccaggtgtatgtctttctgacctgtaaaggagtggagacagacccccagttctctcctttcagccattgttctggtttctcattcgtggagacaacagtgtgagtttctggctgctgcgggggctcccgtgcccattgcaggctgtaaccccctgaaatgagcagagaggcacttgcccacagggtgactggatggggctcagtttctccttgtacttcatgatctcatttgcatgttgttctcctgcttatatgcagctgttctgccttcgagttctatggtaatctctttcccttctatgggtgcagtgagaaaaggctgtagtttgggatttactagcattttgcggtttttccccgccagagttgttatttgtatacctgactggagacttacttcctaacagtttgatataggaggacatcctatgttttctgattataaagttgtcttacctttctgccatttgcttttctaggataatctttttgggggtacagctgctaagaagcagacattgtgtctacaagctcagagagaagagaaagcaaaagcctccgagctctccaaaaagaaagcatctgccctgttgttcagcagtgatgaggaggtgagctgaggtttctgtaaagaagaggggattatttcatgggatttaagagttaaagccatcccaagtctttttctacctgttttatatctcgtgatgttcagtcaccaaaggcgatgttcacaagattgtcttttctgacggaagacatttaatgtaatatattaatttaaagatgaatctcttcaaaatggttaggaataagtatgactcccacacaatagtgtatgctccttcaaatgagttaggccggctaggggggaaatgatttctcagccatcgctagttcatggtcgagtcccttagaacaaatgacagattaaccagagaaaagtgtgcaagtttacgtaagataagttttaccagacacaggagccttcagaaagaaaaactcaagagaaacaggaaatcctgtgtcaattttatgcagtctgatgaagaagcggacagttttgagggagcacgattagatgaaaggggtgtgacctgatgggaataagctggggggagctcagcaaggcctgtgtggtcagatcattctctgcatctttaccaataaggaggctcctttcctctgggaatagggaggactggaatgaaggttttatgacctactccagagagggttagaggattcttctatgtcctgcttcagaggagaagggccagggaaaggtcagagagacctttctgcttctgttttctcaaatgccaaggtgtcatattttgaggtagcatgtcccgtataccccaatggccatatatactagtatcttgttaaatgactactgtgtttcattaatttagaactatagttaggaggagttacctattgaggttaaactcctttttgagggagtcttaacaatatttctgtttgtgatctggatagatactaccaaatcagttagtttagttgctaactcaatcagatttagtagcagggaatcagatttagctgtgcagaaaaagactttaaatatgatgatataaaaaatcctgagtattaaacatcttcctgtgttataataattcctctttttttttaacattgtaggcaagttaatagggggtgaagtggatatataagtcatagatatgttcatgttcttactgaaagcaatttaaaaattccgaagcagattgcaaaaaaaaatgtattaaaagcttatgaggccgggcgtggtggctcacgtctgtaatcccagcactttgagagtctgaggcaggcagatcacttgaggttgggagttcgagaccagcctaaccaacatggagaaaccttgtctctattaaaaatacaaaaaaattagcaggttgtggtggcgcatgcctgtaatcccaactactcaggaggctgaggcaggagaatcacttgaacccaggagatggaggttgtcgtgaaccgagatcacgccattgcactccagcctgggcaacgagcgaaactccgtctcaaaaaaaagcttatgcaacacacatgtgaacaagacacaatgaaaaactgctagtaatccttttactacaaaagtctgagtctggcctttagaaagcgtttaaggaattcccacccagctgtgctcatgccttcacatcaaggaactcccaagcatatataatttgtgttttctactcaaatgtatgaatttatgatagattatccagtttttttcttttaaacattgtcagtgattgttccccctgtagcaacagccagacatcagtgtagttgctcctactagagtattatagtggttcagggaaaataaaaacattacctaaagcttggagcaaaaagacatgcagaagaaagacagccaaggttctagaacaggggcgtccagtcttttggcttccctggcccacactggaagaagaagaattgtcttgggtcacacataaagtgcgctaatactaacaatagctgacgaactaaaaaaataaaaaggttcgtgcataaatcccataatgttttaagaaagtttacagatttgtggtgggccgcattcaaagccatactgggctgtgtgtggcccatgggccacaggttggacaagcttgtcctagaacaaaggctgtcaacttcggctgctcattgggatccatggggaacttaaaagagtgctgacaggccgggcacagtggctcacgcctgtaatcccagcactctgggaggcgaaggaggtgggcagatcacctgagattaggagtttgagaccagcctggccaacatggcgaaactctgtctctactaaaaaatacaaaaattatctgggtgttgtggtgcttgcctgtaatcccagctactcaggaggctgaggcaagagaatcacttgaacccgggaggcagaggttgcagtgagccgagaccgcgccactgcactccagcccgggccacagagcaagactctgtctcgaaaaaggaaaaaaaaaaaaaaaaaaaaaaaagaagacctgacgagtgctgacagtagatcccagctccagagattctgaattaatctggttggggtacagcctcgtcattggagttttgtgatactctctagtggatttcagcgtttagtcactgctaaacattgaggagcacttctcaaaccttcatgtttaggaaatcacccaggcaccctgtgaaatgcaggttctgattcagaaaataggcgcggggcctgaaattctgcataatctgctgctggcttgtggactccagtttgatttgcaagactctagactccagagatagagcacttatgcaagtgcttgggagttctttgatttgaaggggtgtgagcatagtcgagtagaatttccttaaatgctttctaaaggccacattcagacttgtggtaaaaggattactagcagtttttcattgtatcttgttcacatgtgtgctgcatgagtttttacacttttttttcaatctgctttaggatttttagaattaaaatattcttctctggagttggaagttcttgagttcttggtatttttacatttggcttccttcttatagcctctgtaattaatgttgattccctgaaatagacaagtcgcttgtcgtaatacagtgcagaaccacagtgggaagagacatcgtggcaggtgttggaggaggaaatcatgagaagctctgtgaggtcagagagcccagctgtctagatttgagttcaaagaaaagtcttaagcatgagctttcttcaagactgatgcactaagtttaatacttagtttaaatacaacttagtttaacaaatataagtttgattttactccccatgttttataatctaaattgccattggacttttttttctttttttgagacagagtctcgctctgtcccccaggctggagtgcagtggcacgatctccgttcactgcaagctctgcctcctgggttcactccattctcctgcctcagcctcccgagtagctgggactacaggctcccgccaccacgcccggctaattttcttgtatttttagtagagacggggtttcaccatgttagcaaggatggtcttgatctgctgatctcgtgattcacccgcctcagcctcccaaagtgctgggattataggtatgagccactgcgcctggcctggagttttaatatatattttatgttttaaggaccagtggaatattcctgcttcacagacccacttagcatctgacagcaggtctaaaggagaacccagggattctgggaccctccagagccaggaggccaaggctgtgaaaaagaccagtctctttgaggaagacgaagaagatgatctttttgccattgccaaggacaggtgagatagtcattggaaggagtccctcactccgttaccgtggtaacaagaaaaggaatctgatgcacaatctagttcatcgggtgattgctaatcatggatcacatagtgattgtgccagtgagaatgtctttgcttttcaatggcaccatcttttccctcagtacccggaaatgtttgtctttgtggatccttatctgatttcttccccaatcattattttttaaccatattctttttctttgtttgtcagggatttgagtatcttttgtttgtgatttttctctgggctactctaaagtatgtcaggtttggtcaggattacttaaaagttactttaggccaggcacgttggctcatgcctgtaatcccagcactttgggaggccgaggtgggcggatcacgatgtcaggagttcaagaccagcctggccaatatggtgaaaccctgtctctactaaaaaaatataaaaattagccgggtgtggtggcacgcgcctgtagtcccagctacttgggaggctgaggcagaagaatggcttgaacttgggaggtggaggttgcagtgagctgagatggcaccactgcactccagcctgggcaacggagcaagactccatctcaaaaaaaaaaaaaaaaaaaaaaaaagttatttgaatagaaatctgctcagcatttaacacatcctgttaggaggaagttccctgtagagctgtgcagtatcactccaggggctgataacccatagccaacctaggtgcctctccccattaatgctggaactgaagctgctaggatattcagagtgagcgtgggctgtggttggtataacatgctgccagattagcttatgggttcagaattacttccctgcaaatactttttttccttttgaaagcctgacatgattactttgaaattcacctgaatgttattagcagaaagaagtaactgattggacatgtaaatcctatgctttggtgtggttaagcgtcatttgatagattcagaagtacctcaggtttctgtctccaaatactcgaatcttgtcaagcatcaccatttctgcattaggcctctgtaacttgacactcggatgcatctttggtctctgatttagaatataggctctggaaacttgatattaaattctgattctgccagttcctgtctgaataaccttgggcaagttacctaacttccctgtgcctcaatttcctcatttgttaaacaaaaataaaaacagcatttctctcatcggtttgttgggatgatgaggtggaatctaaatgtgaaatgctgagcacaagagctggcacattctgagccctcaggtattgccagttagcatcgtgactgcagggaaatagtacattcctttatttttgttgctctctcctgggacattcttcttcctgtgttgcctggccaccttctttcaaaactaagtgtaagtcttgtttcataagaagccttcccggctgggcgcagtggctcacgcctgtaatcccagcacttggggaggccgaggcaggcagatcacgaggtcaggagttgaagaacagcctgaccaacatggtgaaaccccgtctctactaaaaatacaaaaatgagctgggcgtcatgtcacgcacctgtaatcccagctactcgggaggctgaggcaggagaattgcttgaacctgggaggcagaggttacagtgagccaagatctcaccactgcactccagcctgggcaacagagagagactccatctcaaaaaaaaaggcctttcctaactttaaacagacgagaaagagaagaagtagggagtcgagggcggacatggctccaccttcataccccaacaccctcagctgagcattttctgcactgtatccaggttagcttattcccatgagtgtccactacccccaccccacacaaggtcataaatctggcagtctgaaccccatcttgtttgtgggtcctggttccagccacacaccatacctggctttcaggaatgctttctctgctccagatacatcctacctcctattgttcccgaagttgtctgtcaagttttgtgtatggaaagtaattcataccttcatcagatctcaaaagaagctttacacacacaagaagaagttgaggtgaggatgtgtaggaattggaaccctcatacactgctggtgggaacgtaaaatggtgtagtcactttggaaagtagtttggcatttcctcaaaatgttaaacatagagtcaccatatgacataatagtttcattcctatgtatatacataagagaaatgaaattagttgttcatataaaaacttgtacatgagtgtttattgcagccttagtcataacagccgaaagtgtaaacaacccaaatgtccatcaactgatgactggataaacaaaatgtataaccatacgatggactgttcttcagcaataaaaaagaataaagtagcgatgcatcctagaacatgaatgaacctagaaaattttatgttacttgaaagaagctggtcacagaaaaccacatattgtattgttccatttatatgaaatgtatagataaaccacagagacagaaagtagattagtggttgccagggcctgtggggcagggggaatggagagtgatggctcataggcatggcggttctttttggggtcatgataatgttgtgcacttaggttgtagtgatattgcacaactcgatgagtatattaaagaaaacattgaagtatgcactttaaaagagtgaatctggattaagaaaaccattgaagtacgcactttaaaagagtgaatctggccaggtgcaacggctcatgcctgtaatcctaactgattgggaggccaagtggaaggatctcttgaggccaggtgtttgagaccagcctgagcaacatagagcgacctcacctctccaaaaaagtaaaaaaattagccaggcatggtgacgtgtgcctgtagttgtagctacttgagaggctacttgagttcaggaatttgaggctgcagtgggatatgattgtgccattgctctccagcctgggcagtagagtgagaccctgtcttaaaaagtaaaataaatattaaaaataaagtaaatacaaggtgaattttatggaatgtaaattatgtctcgataacgctactaaaaaaaagaaatagaagccaggcacagggtcatttcccagtgctgatcctggccctgtgatctctcttggcaaccgtcctcatgacaattctggaaataggcctgtccgctttgattctttttgtgctataggaagtgggagagaatgttctgcttgggaaggctcaggcatcgtgtgccttgcagcggtaacagctgatgaacctgcactggatagtaacaggaaaggggcaacctgaggcaggagggacagaggctggtgatttgttggagtcagatttcatctatttcaaaggtctttcctgtttgctttcaactgtgtaaggtcaactaatggcttgggtgtttgggtggtaggtggattcctgtaggtgcagtctagaagaaatattgttgttatggtttttgtttttttcatcacacttttccttaatttgaccttttgtttgtttgtgtagccaaaagaagacccagagagtgtcactcctctttgaagacgatgttgatagccgaggctctctgtttggctctcctcccacatctgttcctcctgcaacaaaggtattcttcatctcttagtcccaggaaatgtccttgagtttatgctgcatcagtagtggtacttccccgaatcagctcttcatacctaaccttggaggctgagtcttatggaagaccttatttgcctggtttcagaaagagatcttctgattaatagtattctacagaagaagcacacgtgcaaagccatcattcagtgtcaggtgtaggaacaaggaactgggtctcagaagaggcttgggccccattggcatggaattctgctaacattagactaggccagttaaggcaaaatcattccttttatgagtgtgtgtcgagtactaacactggtcctggtttatattagccagtcagtaaaaaggaaggaaattctcacatgtgctacaaaatgcatgaaccttgaggccgttatactccatcagtggagaaatggtcacacaggtcctagtacagttagactgtggaatactatacagtggtaaaaaaaacccagggtggagcttattgggatgaaaaacatactgcaggccaaaaaaaaaaaaaaagcgtaaacacgtaaacatggtgtaatttaaactttacaaaacaagaaatacacatgaatgcctggaaaccggcctgaaagcatcgatagcacattgttaccagtgattatgtccagggaaaggtatggaatggggaacttcatactctcaatgcctttttaaagcctttttaaggaaggcatttgtgcattactgtggaattagaaataaactccaaacaaaaaatatctaggagatacggaagaagacccttcctgttaaatggagttgctcagcttataccagaagctctcagccctgggccagcatgctgcccaccctgggccccaggctccctgctgctgcttctacggggctcctgagcctttccttgggtgctctgtacttacatctccccctttaaggacatccagtggttgtacaattaaaggagtcaggagatctgattggtttttctttgtaaattataaataaactactctggaggataactgagcaataaattaatgaattttggagcctctggagctgtaaaacttctttcaacctatggtaattatgattgttaaataaaacaaaaggtcaagacacacaacttaagtagctgaatagcctacacgtttttgattatttgtgaaatataatcatctttagacaatagtaaataaaagatatttcttgtttacagatatttcagtgtaagttaattgtgacttggttgtaagcctatgttgaccaaaaggttaaaccacaggcaggagaacttaaagaaatgtaatgtgagttttgttttgagccaagcttgagaactactagcccagtaaagagactccacacaaactgagaatgcgtcccagagtgggccacacgagacacagcatttatacatttctgttatatagaaaatgggaaaagggggcagtgaagcaacggtgactttcttaattcagattggtgctcagtgacattgaatataagataaagtaaatatgtggttaatgtattttcctcattagccttttaccctaatgagtacataggggtcgcagttgcagggtcaggagagggatggttgattttgtgctgcctttgtgcttcatccaataggcaggttgtaatcggtgcctgtcagtgtgatatttgacagactctggccttgcaggtgaggttcagctttcgttcataggcccggtttctattacccatatggccaagatgcagccattttagacaatttttttttcttcagactttccttattttctgacacctatcaagaaagtaaatttgaccaggcgtggtggctcacgcctgtaatcccaacactttgggaggctgaggtgggtggatcacctgaggtcaggagtttaggaccagcctggccaacatggtggaaccccatctctattaaaaatacaaaaattagccaggcatggtggtgcacgcctgtgatcccagctactagggaggctggggcaggagaatcacttgaacctgagagatggattttgcagtgagctgaggttgtgtcagtgcactccagcctgggcaacagagtgagactccatctcaaaaaaaaaaaaaaagaaagaaaaaaacaggaagtaaacttcatgacaaggatgagcttgtcttcaagaagattaaaactggtactttgggtagcattttctgtggtttaaggaccttagttatatatgaaggaagaatatgatttgccatacttaagtctctttttgtctcccctatcaactatttgcattgaatttttttttttttttttttttttgagacggagtcttgctctttcgtccaggctggagtgcagtggcgcatctcggctcactgcaagctccgcctcccgggttcacgccattctgcctcagcctccctagtagctgggactacaggcacccaccaccatgcccgactaattttttgtatttctttagtagagacggggtttcactttgttagccaggatggtctcgatctcctgatctcatgatccgcccaccttggcctcccaaagtgcttggattacaggtgtgagccaccgtgcccggcctgcactgaatttttatgtagttttcagtgagtccaggatgttccacaaaagccttttcctttgattacttcagtgttgccttatctcttctgaaattctttatgccttccagtgttcttttatgttaagttcaatggttttgcactttacttatctcttcctaactaaaaatccccttgctctcttctttcttcattcatcacattttaaaatcatgattagcaatgtccttccttagtttcccaaatctgccttcctaacttgatttaggcattgcctcaaagcacacttcctcgtgtcatatggtatgatttgtatctgtactatactataatagagctttagttttttctcaagcacctgttgataagtcacttgctgcaaaaatgccatgaattccaggaaagtcacaaacctcagtttcctagtccccaaatccctgcctccctgataaggaagagatgagaaatgggctgaagtgcttgcagacttgtattgaacactgagttggtataaaacactgggactgtccatgaaaatatagtgtatagtcctttcagatgaacagacaaacagatgtgtgctagctgttatataagttaggaagaaagtcaaggaagggtcaagtagagagataaatattatgcttattcaacaaagcaactgacacttaactgaagaggacagagaccgtgggtgacatctgcgtgggggccctgcttgaaggatggggaggatttgcacctacagacatcgagggcagtgtggcatggaagtttgaaagtttgcagtgaccttaaggaacagcagggaaaggaggagatgcttatgagtagagggatagaatggggtatctgctgagtgtcatttgcttcatgcaaggagtgctggtttgggttgggagaggacctgatccagcaggtgttttgttttagcaagacaacgctggataatgtcttctagttgaaatataagaggagtgaggcagagagagagactcataatcgtctggtggcagagataaggatctgagggagggaggcatgggggttgacagacacaagtagacagatacaggtgatatggtggcgtgaagtgtcctgtccacaagtcccgggtggtggtgtttgttgcttctcccttttggtgctaccttcactatcctgtcctctcttccttgatcacatttagctgaagccctaagaggatggtttgggcttgttctgtatatggccatgctggtcagacacacttttttattgttgtggatgtcatgtactcttcttttggtagaaaaaagagactgtctctgaggcaccacctttgctgttcagcgatgaagaagagaaggaggcacaacttggagtgaagtctgtggataagaaggttgagagtgccaaggagtcattaaaatttgggagaactgatgtggctgagtcagaaaaggtggacttttttctcttgtatacttgaatgcatttgtctctcgtatgttgtttcaaacacacccaaccccttaagttttttgaccacagaaaataaatggcccatttgtagacagatttgaaaacatagacaagcaggctgtgtccccacagtgcaggaagcctctgcagggcctttcctcccggcccttctccaagacatgtgcgcactgtggtgtgcctgctcctgtctctgtggttactgtcacgtcatggcatctttgctttctaacttgttctcttctgtgcagtgttcctgttacccttggtcctcctttggtccccaactgcacttgaatttaaatgtcagttttaaggagattttagtttagcatccttttacttttagatgatattggcaaggattacagagtagagtgaaatttctactctttctaaaacactagctttcaagtcctggacggtctgccgtctcttgcaggaggcctgtgggtagttctgctggccaaacctgggcatccagctttgtggttgccttcagtctctatatgcctcttttctttctctaacttttcttatacgctgtgtgtccagctgcttaggtctaagatctcccagggcctgtgtgaagagcgttgcatttgcatttgctgctgaggctccttggagctacagtgatacaagcatttcatttgtacctgtgttcctgtgtgaaattctcttcctagtggctgtgtgtggaccccagtcctatcccagtcctggtccacacttgactctgactggttgctgtactgccctctccctgagtgtaagccccttgcggactaggcccagtttgttttgctcaccatcatatctgtagtactggcatattaccttgcacacagtaggcactatgttataaactttgtatttctttaaaaaagcatttttttaatagtttgagtactctgaaatcgggatgtacctcataatcaatggtatcttacctgaaatgtgccatttgttgaatgaataaatactgcattttagaattatttcagagattcttcttcaattgcctatacagtgtaagccttttacaatttgagggtctgattttcctgattagatttcccccttggggcttatgtattagttaaatgctacgaattcatggtccactcccaatgattggcacttgtattggttatctttgacacttagaagttcttcctagttcatgagcaaccagtgtgcatcaggattatagccgtcctatcacttgataggagagagggacccatggtcttaatgcttggaaaagttatctttggctacggatgattgtacaagactgtctcttggagcagccaatcaagaattgacctcagtgttttgttacttgggcacagatgtgattcactgtgccctgagtcatgcaaatgtggcagttactgaattaacgagaagcttggcaggctccatgataggatttgtatttccaggtgttacttattttttccccctattattttcattttcaggaaggacttttgactagatctgctcaggaaacagtcaagcattctgatttattttcttcatcatccccatgggacaaaggaaccaagcctagaaccaaaactgttcttagcttgtttgatgaggaagaggataaaatggaagatcaaaacattatccaggctccacagaaagaagtaggaaaggtaagcaaaaagcaatagtggttcaagtctctggatgagataaaagactctcatctcatggttgtcattctgtcatgtgagtttctgaaggaatcttaaccttcaatgtagtgtgttaatgattctgggcagtcatttagatatttgggaatcttaatcaggaactcttacctcaagtagcagtgttaggataggggattagaatttcaccccccctcttctgggatttacagaccttgttgttccttctagcaaaactttgccccttggccagttgtgggatgtaaacagcaggaaagggaagttaggctggagttgtacagttaagtatttctaacattcagtttaagaaaaagtgttgtagatgaacctttcatactgatcaggtgtcagcaaactatttctataaaggaccatataatgactattctagcttttgcagcctatttgggctctgtcataactgcctagctctgccattggcagcatgaaaacagccctaggaaacatgaagatggatgggcatgactgtgttccagtaagttttattaataaaaataggtgatggtcagctgggcatggtggctcacacctgtaatcccagcactttaggaggccaaggtgggtggatcacaaggtcaagagatcgagaccatcctggccaacataatgaaaccctgtttctactaaaaatacaaaaaatagcttggcgtgatgacgcttgcctgtaatcccagctacttgggaggctgaggcaggagaattgcttgaaccaggaagtcagaggttgtagtgagccgagatcgcaccactgcactccagtgtggcaacagaacgagactccatctcaaaaaaaaaaaaaaaaaaaaatagatgatggtcattctgtgaggttagtatgaccctgatattaaaactagacagtgacatcaccagaaagctagatatcctttatgaatgtagaggccaaaatcctcaacaaaaatactactaaacccaattcagcaaaatataaaaaggattgcacattatgagaagtgagatttacccctggaatgcaaggttggttcaacatctaaaattagttgatataatgcactgtatcaataaaatacagaattaaaaggcgcatgatcatctcaacagatgcagaaaaagcttttaataaaatccaaaccttttcatggtaaagcactcaattaggcataggaggaagcttaatgaacttgataaaggacatctatgaaatccctcagctgacatcatacttaatggtgaaagactgcatgcttttcaaccctaacatcatgaacaacacaacaatgtccactcttggtaattctaatcaaccttgtactggggattctaagcaggccatgtaggtgagaaaatgaaataaaaggcattcagattggaaaggaaaaagtgaaatgaagcaatctgtatttgcagatggcatgatcttttatatagaaagtcttaaggaatctgcaaaaaacatccattggaaataattaaagtcattaagattgaaggatgtaagatcaatatgtgaaaaccaattgtagttctgtaagctagtaatgaacatttactaacttacaaaagttactactagtaactttctttttttttttttttgcaatggagtttcactcttgtcccccaggctggattgaaatgacacaatcttggctcactgcaacctttgcctcctgggttcaagcgattctcctgcctcagcctcctgagtagctgggattataggcacccaccaccatgcccagctaatttttgtatttttagtagagacagggtttcaccgtgttggccacgctgaccttgaactcttgacctcaggtgatccacctgccttagcctcccgaagtgctgggattacaggcatgagccactgcacccaacctactagtagtaactttcataagcaattaccagcttatgaatgaaattaagaaatcagtttcttttatagtaataccaagaagggtaaaatacttaggagtaaatttagcaaaagaagtacaagacttgtaaactaaaatctacaaaacattgaaagaaattaaagacctaaaattgatggaaagacatctcgtgtttatggaccagaaaccttaatattggtaaggtggcaatacttccttcccaaattgatttattgtaatctctatcaaaattccagcttgctttttgcagaaatggacaagctgatcctaaaatttttatggaactgtaagagaccaagaatagccaacagtcttgaaaaggaagaacaaagttagaagactcacacttcctgatttcaaaacttactttaagacaggatggtattggcataaggttaaaatatatagatcagtgaagtagaattgagagtctagaaataaaccctcacatttacagtcagttgcttaaggtgccaagatatttcagtggggacagaatagtcttcagcagatgtgccaggatgctgattatctacatgcaaagggatgaagttggacccattaataaataaactcagatccaatgtaagatccaaatgtaagaactaaaactgtacaactcctagaatctagagagtatgtgagtaaattatcatgaccttggattaggcaaagccttcttagataagacaccaaaagcacaagtgacaaaaatagctaaattggactttatttaaatgaaaaacattgtgcttcaaagggcaccatctggaaagtcaaacgaccacccacaaaatgggagaaaagatttacagatcatgtatttgataaaggactcagatccagaatatgtaaaagacttataagtcaataataaaaagacaaatagcccagttgaaagaagggataggccaggcgtcgtggctcatgcctgtaatcccagcactttgggagaccaggacgggaggattgctttaggctgggagttcaagaccagcctgggcaacatagcaagatcctgtctctacaaaaaattttaaaaattagccaggcctggttgcgtgctcctatagttctatctccttgggaagttgaggcagaagagtcctttgagcccaggagttcaaggctgtagtgggctgtgatcacaccattgcactcaggctgagtgacagaacgagaccctgtctgaaaaaaaataggtaagacagacatctgaatagagattttactgaagaagatagacaaatggccaaaaaggatatagaaagatgctcagcatcagggaagccaaaaccacagtgacataccacttcatacccgggaagaggaccataataaaaaaaaaaaaaaagggaagtaacgagtgttggtaaggatgtggataaatggaaattctcattccttgctgctgcaagtgtggaacagtacaaccactttggagaacagtttgctgttcttcaaattcttataacataaagctatcacacaatccggaattttattcctgggtacatatccaagagaaataaaaacatgttcacacaaaacttgaatatgattgctcccagcagcattattcataatagccaaaagatggaaacaatggctaaacataatatagtatatccatacaatggaatattatttggtaataaaaaaggcaaagtactgatacatgctgccacatggatgaaccttgaaaacattctaaataaaataagccagtcatgaaagaccacatattatgtgattccatttatatgaaatgtccagaataggcatatcaatggagacagaaagtagattagtagttactgggggctgggagtagccgtgagcaggaatggataattactgctaatggtttggggtttcttttgggagtgatgagaatattctaaacttagattgtggtagtggatacacagatctgaatataccaaaaaatcattacattttatacgtaaatgggtagattttatggtatatgaatttgatctcaatggtgatgttatgcaaaccaggttggcaggtcatagattgccaatcctttttatagatctaaccaaagaaatagtctatgtttatttctacaaaaaatgttatatgaatttttttgttataccaatactataagcttatttataaatgagagctgcacacagtgaatatgattaatttgatatattttctcccagtctcttactgtgtatggttttgtaatatttttccttagttgtgaaatatttaacattacttgctgtgttaaactcatttttatatataacaataataattattgttaatgtgatttattttgttagaagtaagtttttcattagtttttttggtttttttgttttgttttgttttgttttgttttgagatggagtcctactgtgttgcccaggctggagtgcagtggcgtgatcttggcccactgcagcctctgcctcccaggttcaaggattctcccacctcagcctcccaagtagctggaaccacaggcacacgccaccacacccggctaatctttgtatttttagtagagatggggtttcaccacattggccaggctggtctcgaactcctggcctctggtaatccacccgccttggcctcccaaagtgctgggattacaggcatgagccaccacgcctggcctttttgttaagttttaatctgtggctgtgataaggaaatagggatgaattttagaatgtcaggtctggagcattatattatcaaaccaataatgttgatggtaacttttaaacgttagatatctagtaaacaaaaagggactcactcggagtctgaaagtagggcagaagtgatggacagccataggaaggcttgtggtcgcacctgtgccaggtctttggcctgcagtgcttacaggtgagggacacatacttgaccactctgtgtagtttgtacttgattcagctgctgtctcttcttccctttggaaatgagatgaagagaattcattcagttgtatgttttttaccttcaaaatgtttctcattatggaactaatggattgcttttctaataaaaaatttagatactatacaaagtttatataatatatataacctggaaagattatctctaaagcttgtgcatatatatatatatatgtaaactttgtatttataaatatattttctggtatttttggaagcgccatagcattccattttgtcaatgtttcattcccctactgagtggcttttaggctgtggccagccttttgctaatataatacagctgcaggggacatctttgttgtgtccatctttacatatgtaacttccttgagataagttcttacagctctaatcacacatgaccttccctcctgttcccagggccgcgatcctgatgcccaccccaagagcacaggtgtcttccaggatgaagagctgcttttcagccacaagctccaaaaggacaatgacccagatgttgacctttttgctggcaccaaaaaaaccaaggtcagttccaaatggttccccacagtatgacttgttattgtattgggtgctgtctcaacagctcacctagttctctttgtaaattgttttgcttttggatattgaacttgggtcttgtttattctagctgttagagccaagtgttgggagcctgtttggggatgatgaagatgatgatcttttcagctctgccaagtcccagcctttggtaccagccttttgttctcaatactgggttgtgtgggaaagattctgggaaaggaaactaacgtccagttagatcattaaggaaaatcctaggagagtcgtgctgcttcctactaaatgaatggcaaataacatgctgaggggagcgtgtgtggaggatgcaatgcttagtttctgttgttcctcattttatgttccctatactaacattaaaacattaataatccaggctctctgactgtactgcacatctgtgtgatgtttaaatggttgattgaaagaccattgcatacactggggtgactaaatattcgtgcctttcaggtgcaaagttttgagtctgagttttagcctttctatgtcattttctcccccagccccagtaggtttttgtaagtactctgttttctttttatcgtagagaggactcctgtgacagccacagtcttcagaatgctatttctgaaatgctacctttgagttggttcagccctcatttgagaaagtatttttaagactcagaagccaggattgttttttgcattatgatttttccttaaaatttctaagatatttgatggctttttggtattttttttcttttgaaggtacaagagaaaaagagagtagtgaaaaaagaccactctgttgactctttcaaaaaccagaaacatcctgaatccattcaaggtagtaaagaaaaaggcatatggaagccagaaacacctcaggttagaaattctctttaaggattttcagctcttgtttgcatcccagtacagagaaattccattatgcagacccacagttattcagacttgtctgcattaaggaggaaagagcaaccagggctaccgctttgtcttcactgcactccccccaagtcatctcccctctcctcgctccacacgccagagtttcatgaatctatactttaatagttagtgttttttgatgccatgccagatttgactctgaagtggagttaaggtaggatgaagaatcttcttcccactaaagaatttatttctccctctggatttccttggaatagaattaaaatagaaataaatataaattacatctgatttcctgcctgctctcagtgttgcctctcccaaggtcattgctgttgggccgtactctgcagcagtcttcccagaacgctgtggagctcctcctgggaacagcccaggactggagagcgagtgccagttccacgtgcaggtgtcccagggtgtctcactgaagccttagtgtcctgagccgtaaacctgaggcacttggacgaacacatcaccactgacccttcctggggctcagatcttttgcttttagagccagtgcattaggctatggttgaatttttgtgtgctccttgaaatttctatttgataaccaacatggtaattttgcctgctggtcagttttaggtgctctgataaactgtgactcttgggaatcttactcatcttgtattccttgactccatatctgatctggcagctttccacttacgtgacagaggaggaggcatacgtgaagtagtgctagtgaaacatcaggccccaggagagatttgaatgcctttcccattaaagagctacagaaagtgacagttttgctccatcacagatttatttacaggcataagaaacacttgtctttctgtttcccaaatggatttttaactggatgtaattttacacaggactcatcaggtctcgctccatttaaaaccaaagaaccatccactcggatcgggaagatacaagtaattaaaacactggaatcttcattgcctgccctgtggcatctataaacttttttgggtttcctacttttgtcagctgctgccaagcatcttctcatctcttcccccgcctcccctcccctgcacctagttgttgtctcctgtgtgctgcgtctttaacatctattttttgagcccagtggtgggcataggtgtaagacgctctgttttaattctgagactagatcgggcgattttcctacgtttctctactcctctcgtattatacattatgtgcaccgaatcttgtcatgtgtcacaataaagataatagactgctgtgttgaagaacaaatacagagtttcatttttcttctttaggcaaatttagcgatcaacccagcggccttgctgcccacagcggcttcccagatctctgaagtaaagcctgttttgccagaattggcttttccttcatctgaacacagaaggagccacggtctggaaagtgtgcctgtccttcccgggagtggggaggccggtgtgagttttgatcttccagctcaggcagacaccttacacagtgcaaacaaggtgatgaaaccatctttgcttccttgctctcttcttttaaccagaacgtgcatatgcttctttctagtttatcaattgcatacacagcagtctttgactctccttttgaaggaggtgcctcatccttccttcagccactccccactccattctccccacccccctcatcctgcacctgcttttccgtggcctgcatttggtacatttgcattctgctcagtagccacagtaacgtctcaccactttggctggtgtctgacacctgcaggtttccagcactgccacctgggggtcttctaaccacagagcagatcatgcccctcctgctggcgcttcctcactactccaaggagagcattcgggctcctgggtttggtatgaaacccctttgcaatcggtgccagcccatgtgtgcagcttcctcactagtcacttcacactttccagcctgactccaggcacaccaggtgccactccctgaacacacatggtctgttctgttgctgcccaaggctcctgctgcctcctcaccaggaatgctcctctctgtccacagctgtgcttccacatccccacttctgtgactgtgccctgcactccccgcaccaagttcccacagcagcgacactgtttcatgggatctcctcaatggactgtgaaccctttgaagttttcctttcattgtagttgggtttcttgtttctatccagtctcccttctctagaaagctttagctgatttccaagtaagcgacaggacacagaatgacctaccccggcaaatagattcatttcaaatgtttccaaacctgtttccttgtgcaaaacaaaacagccttccttttaacgagaattttcattggcttttttttaattaagtttaaattggcaactaaaattgtgacattcccctgaagttgacaacacaatcatactttgcccaaagtagattgtagcttctcaaaattctacttgattgtatattttggaaactatcataaacactgcatcattgctactaagtgattcatgttttgagattatatgaaaagttctgatttctaagccatatttcttatgtggaatatttaacatttgaattcaatgtttattgacttgaagaaaacagcaccctagattacctctctttattgtgtcatgtttctccccgctcctggagcctgaatttagactagccccctaacaaaggttagtaccagaattccccgattctttcttgttttgaaagatacccacgtttctattgagggtagagtaggggccaagggaggggttgtgagacagagagccaacatgcctactttccaggtttccagcaacagataaaactttttgtgtgaaactgaactgaaactgccctgagaagattaaaaaatggagaactctaaaggattaagaatgacttagtcttggagtactaggagctattaaactccttccttggaaatcattaagaaataacctcttctatgttcttagataatatcttcattgaagtagaccagataaccttataatattttgagtcactgattctttgccatggtagctttgaacactttattttgtcgtcagatcaatgtgtgtttttttgccattgcagagccgtgtcaagatgagagggaagcgtagaccgcagacccgtgcagctaggcggctggctgctcaggagtccagcgagactgaggacatgagcgtccccagaggacccattgcacagtgggctgatggcgccatttccccaaatggccatcggccacagctcagagcagccagtggagaagacagcactgaggaggccctggcagctgccgctgcaccttgggaaggtggtcctgtgcctggagtggacagaagcccctttgcaaagtctctgggtcattccagaggggaggctgacctttttgattctggggacatcttttccacgggcactggatctcagtctgtggagagaacaaaacccaaggcaaagatagcagagaatcctgccaacccaccagtgggtggtaaagcaaagagccccatgtttcctgctctaggtgaggccagcagtgatgatgatctctttcagtctgctaaaccaaaaccagcaaagaaaacaaatacctttcctctcctggaagatgaggatgacctctttacagatcagaaagtcaagaagaatgagacaaaatccaatagtcagcaggatgtcatattaacaacacaagatatttttgaggtaataggacttaacacgtttttgtgtctgttctaagttaaggaaggtatctgattggcttatttgagccatagattatgtctagcttgttgcgtgcataccccatagccacttgcttagtaattataattaggctcttttattaataagtctaacattgattcagaagtggttttttgttttgttgcatgtagattgcatttcttggctggccatgatcattgatactggtcttggtttctctagtttttacagtttttttatttttatagaatattgttgtaatcagcttcctgggcatgccactcagtgacatggcatacagctccactggtccagcttgggagtttaacctctggttctggggacattggccctggctggagctgacaatgtagtgcatgcaggcaataagactttcagtggcatttgctcagcagatgtttattgagcacctggggactgcaggcacgaggtgaactcagagaagtgctaggctcctcagagctctctgggaagataatcaaatacaaacagggcaatggataattaagatgttttcaaatagtactaagtgtcatgaagaaaataacctggggcagagtggtgggtagggctgggaggtgctcctttaggcaggactggtagagaaggtgtcactgcagtgccggcatttgagccggggtgagatgggcgggccaagctgtgcagagatctggggtagtgcatcccaggcagagtgggcagtcttgaggctgttccacacaccctggccaattgcatttccatagctcgttgttgtgtttgagcttaaaaagaaaaattgatttaacattgttttgtatgtatttttggcttaacaaggatgatatatttgctacggaagcaattaaaccctctcagaaaaccagagagaaggagaaaacattggaatctaatttatttgatgataacattgatatctttgctgacttaactgtaaaaccaaaagaaaagtccaaaaagaaagtggaagccaagtctatatttgatgatgatatgggtaagtttggttttctacatctgacctagagaattcttacctttctgtcacttggtatttttcttgctaccttttcttggcccttttctggaaaatgcaccccagcgggttcacttcagtgtaatcctgagttaggctgaagataggtaagagatggactaattattttagtgaagtaactctttcctatgatagtcatcaaagaatttgaaggcacccagagtttgacgtttaagtataatttaactttgatctcagtgcacctcaccaatcatctgtgacacaccccggtgttatgaaaggaggtttgatcagaaatgacctcacgtgctaaagtaggctgaggggactgccttgggtgtgatgtggttggttgagtcagagctccagatagacagggagtgtccatggttctgtgcgagaagagagcaagtctagacctgggtgtaggctctacctcaggcgttgcatttcactgaggtctttggtgtttgggaacaagcttgtcttccttatatggcacaacttctgctttattagtagacaaggcaaatgcccgagaaccctaaatattggacttttgataaatcctgtgggctgaggccacatacacatttcctactctccccatcaatctagaccttgagactaactgggagacagctggtgctgcagagtcacacactggctctgtgcctccagcaagccgtgtgctctgtctcccctgcttcccgccacatggagtgcagaagggaactcattcattattttaaatacaaaaaaagtaatacatgcttattgtaatagattcatgcaattcagaaaatgtaagaagtgaataacccctagaggtaatagtaacagtttggtgtgtatcctttcagacacagtgatattaatatatgtttgtgtacacatcaatatatacccacctttttaaaaagtaagaatatatttacctattctgctctgtcttttagttacttaatgtcttttcatgtcagtacatagagatctccttccttgttttcagtggtgtgcacgatttctttgtatttagccattagcctgttgatggcaatctcagttgtttctgttttctttattacaaataatgctgtggtctttaccatttgtgtacacctaactttatgtatacatgttaaatcatggttggataaaaccctagcagtaacattactgggtaagtaccataattagataagacaagcttttgagtcagtgaaacactaaaagaatgcagtgacggaggcttacagtcttacatcgagatgcctcaaatcagtgcatttattctgaaagaaaacaggtgggtcctatgttggatttccctttgcgtatttttattgctcttttaaaacccagtatgaaaagaatatctaaataagtccattgtccctgatggtaggggcgtgggctggtttggagatcaagttacgcttcccttttttctgtcctacacacgcacatacatacacttttgtagctgaagaaattgtgctccaagagaaacctgtgtgtgatcataaaatttaatgagtaacaaacacagaaccagaatctaagaggcttgagttctaggttagtgttttagggtactccatgctgttaccagagctgggtctttggtggtttgcttgcatgtgtcttaaaagtacctttctccacccctcttcagcaaccgtttttcttttttctttctaaagatgacatcttctcctctggtatccaggctaagacaaccaaaccaaaaagccgatctgcacaggccgcacctgaaccaagatttgaacacaaggtgtccaacatctttgatgatcccctgaatgcctttggaggccagtagagcacacagggtatccacaggttaccctgcagctacattgttgagttagtgatgatgttgtatatgctgatggtcttaactggattacaaaaagcaaatactagaacagctagctcatcgttcacccaatgtacttggtatttttctgcactggtttaatcatgcttaatactacaaaacaaaaataaatatttcacagtggttggtttgttttgtttttaaaccacagtttgatttagttagccttgctggggccataatatgcttcagggtgtgtaaaagaagaaatctctttgtggctttcatgggcagggaatcccagagatagcaaatgccacctgaccagaagtctttgttatatggatgggaaccctaacttagggcctgggcaggggaaagagaaagaaggtgagagattatacttcatgagtcttagcaatatgggagcaggttttcactgaattctgagggtgcctctgcatgtcctccaaggcaaagtttggcaaactgtggcccccccactgtcatattttgttaataaaattttattggaacacaaccacattcatttgtttacttactgtctgttgctgctctcaccctacctccaatgtaagagttgagtgattatgacagagactggatggctcacagagcctcagatgttttctatctgcccctttatataaacagtttgctgaccattgctctaaggcatccttttccatccttgtcttgtggaagcagcagaatgaacctaggtaatagccaggggaagtgctgaagatggaaatgtcagcctctagagcagcactgccccatagaactccgcaggaatgaaaatgttctttatctgcatcgacaaaggcagtagccactagccacctggatggctgaccccattctaatctgtgttttttggtgctctgtcatcttgctgctgactattcagcctgtcaccacagcacagtcttgtaggccgcccaggttggtctcagcgatcctggagctacttacttcttccttgggcactgtaagatcggaaggggaattactcatacccagagtcaaacattttgtacagcttccacaggtcaaccatatgcccaagtctgctgtgagagtgacgtgataacagataagggcacttgctagttggccactcctttcccctattcattttatgcatcttccttctgtccttaggttgagatctccgagtcgctgttgtcaggcagactgctgtcctccagattcaggcctgtgggtctggggagccctgcttggtcttggaggagcaagggctgcgcaggtgacttggtggcctcaagtgtataggtacctggatggtgcgaggagatgctggctctgaaatatttcctaatcccgcttgcggatcaactgctgactagcgtttaggttacagatatattagacggttgatgtgattctgtagctcgtatttagaactttagggatgttttcacatatcagtaaatgaagatctatgtaaacatttttttttttttttttgagatggagtctcgctctgtcacctgggctggagtgcggtggcgtgatcccggctcactgcaaccaccgcctcctgggttcatgccattctcctgcctcagcctcccgagtagctgggactacaggtgcccgccagcacgcccggctaattttttgtatttttagtagagacaggttttcaccatgttagccaggatggtcttgatctcctgaccttgtgatctgcccgccttggcctcccaaggtgctgggattacaggcgtgagccactgcgcccagcctatgtcaacatttctaatggtagcttcacattctggatatctttatgttggggaaaaagttttaaaggtaactgctcttctgtagcaaagcttttttagagcagaggatggagcaaattctgagttactgaaattacgtattcagcgctattgccttgtttaccttccatttcatctttggagttgtgtttttagaactttttcagaagggatgagataaatgctttgggaattgatttagaaatctttttggtgtctttactcttaagagctagatatattttttaattgtaaaaaattatggaaatacttttttctctacctgctcccattttttttttttttttttttttaaagacagggtctggttgtgttgcctaggctggggtgcagtggcataatcatagcttgctgcacctttgaactccagggctccagtcatcctcccaccttagcctcctgaatggctgggactacaggtgtgtgccatcatgcccagctaatttttaaaaaaaaatttttgtagagacaagggtctgttgcccaggctggtctcaaccttcttacctcaagtgattctcccaccttggcctcctgaattgctggaattacaggcatgagccacaatggccagcttctttctgttttctttgtttcctcttccccttctgttttcttcctttttcttttttcttttttcttttttttttttttagctgttcttgcatcattttccatcccatctttaagtcttcattgcctcctcattttccaagatcatgagtcccacagtatgctcagctaagcatgaccacacaccatttcaagaagctgttcatggacccagattttattaccagctgggtctttgttctcctgctgcagcttccatttgctcctcagctaccctctaggcatccagtctggcttaaccagatttcatggcctcattttgtcctctgctacagtgatttctactcctgaggagaagcataactatcttctagagggaaacattttcgctcttggttatcaaccttggttcttttgggatattggaaattaccccattgactggacccagacttacggtggaagttccagcacaattaatgctgaacggggttgtgctttttcttctggcatatagttgaattatccattctcattataggtgaaggacttgcaaatctgtttgttatcttctaccctcccccagcctattattttcagggtctcactatggaagaacactgtggtgaaggaaacaatccagattcctttggcagtcatagtcactcatgtctttatttctgtcatgtgcattttgcagtcctgacacctgacttctgttgctagggctgcacctgtgtaggtacgagtactgttggcttcggggatacacactctggcaactctataggacagtcttatttgatatagcataagtatgtttttaagaattcatgttatccaaaattataaaagcagttgtttgaatgagtgaaagaaaggggattaaggttagaaagctccatacaaagtcatatataagcaatgcagctttttaatttagcttttatttaagagcaatgaccctttaccactatcgccagcagtattattatcctggtaccttgtattactcttaatacccatcattttgaaatatggtgcaacaacactcaaatgagctgcactacaagaaacaactttcctttctgtaatgccctccctttaggatcactagaagtctgtacaatgcaatgcagattcccgaattaatgatctttcctatcagtgtaataaaaactcatattatggcagattcctgtatgtgcatgtatgttatgagttggataaacgttggtggacttcatttggagtgaatcagaatgggattcctgtgagaagccaacatccctctaaacaaacttttggagcatgatatggcttggatgttttgtccccttcaaatctcatgttgaaatgtgaccccagtgttggaggtgggcctactgggaggtgtttggatcatgggggtggatcctcatgaatgtcttggtgctgtccttgtggtaatgaatgagttctcactctgagttcacatgagatctggtttaaaagaacctgggggccgggcactgtggctcacgcctgtaatctcagcacttcgggaggccgaggctggtggatcactaggtcaggagatggagaacatcctggccaacatctagaaaccccatctctactaaaaatacaaaaattagccaggtgtggtggcacgcatctgtagtcctagctactcgggaggctgaggcaagagaattgcttgaacccaggaggcagaggttgcagtgagctgagatcgtgccactgcattccagcctgggtgacagaggaagactctgtctcaaaacaaacaaacaaacaaaaaaacaaaaaaacaacctcacacctccttcctctctctctctcttgttctctcaccatgtaacatgctggctcctctcctcctaccatgattgtaaacttcctgaggccctcactggaagcagataacagcattataccccttgtacagtctacagaaccatgagccaaaataaacctcttttgtttataaattgtccagtgtcaggtattcctttatagcaacacaaacagctaacacaggataaccaaatagttattaatgtctaaaacttggagaataccttacctatagcacaggtttgttctgaggatcaattgaaagactaaaatatctgttctttccttgaacaaagctttaatgagtaccaatatgtgcaaaacactgtgctaggtggtagagatcagatgtgctcccttcagtttagtaataaatgaaattgttagggactgggtgcggtggttcatgcctgtaatcccagcactttgggaggccgaggcgggtggatcacgaggtcaggagattgagaccatcctggctaacacagtgaagccctgtctctattaaaaatataaaaaattagccaggcgtggtggcaggtgcctgtagtcccagctattcaggaggctgaggcaggagaatggcgtgaacccaggaggcggagcttgcagtgagtcgagatcatgccactgcactccagcctgggcgacagagtgagactctgtctcaaaaaaataataaaaataaaataaaataaagaaattgttatgggtgcaatatatgatgtaggtagtagtgtaaagggggtaggtataaaagctttgtggaatagttgatattggagctgaatgttgaaaggtgattaggtgcttgtcaggtaaccatgtgtgcacatgacagtaagtagagcagagcaggagcaacaatatagaagctgaagtgttctgaagctgcagatgcagatgattagaggatagaagtaccagagatgttgcaagatgaggtgaggttgtagatgggtaaaatggggccagaatgtgagatgcataatcttgggagcatttctaaggagtctgaattttattctatagagagggagaagtcattataggaccttgaggcaagaaataacatgatcagctctacgttttcaaaagataactgtgctccacattatgtgtcattagggaaatacaaattaaaacagcagtgacgtactattacatgactgttacaatggctgaaatccaaaacactgacaacaccaaagttggggaagatggggagcaacaggaactctcattcactgccagtgggaatacaaaatggtactttggaagattgtttgacaacttcttacatattcttactgtatgatccagcaattatgctccttggaatttgcccaagtgagtagcaaacatgttcacacaaaaacctgcgtgcagatgtatatggaagcttttttcataattgccaaaacttggaagcaaccaagatgtccttcagtagatgaatgtataaataaactctactatacccagccaatggactgttattcagcaccaaaaagaaatgagctatatcaacccatgaaaagacatggaagaatcttaagtgtgtgttactaagtgaaagaagccaatctgaaaaggccgtatactataaaatcccgaattacgttctggaaaaggtaaaactatggagacggtaaaaagtgtagtgtttgccaggatctgaggggagagaggaatgaataggcaaagcacagaggatttgtagcacagtgtatgtattctgtgtggtactgtaatggtgaatacacgtcattatgcattagttcaagtccatcaagagtgaaccctaatgtaaattacaaacttcaatttatgtgtgaaaatgatgtgtcactgtggggttcatcagttgtaataaatgtaccactctggtgcaggttgtgataggagaaggctgtgggagtgaggggcatataggaacattgtaatttctgctcagttctgctgctcaaaaaatgaaatctattcaaaaaggaacgttttcatgtttagactaacttagttcatttccctcatttagttccttaattgttgaggtttcattgcaatgcattctaaagtcaaacataaaatcattttagagctttgtgtgacttttccccttgcttaaacatcattgcagaataatgtaaaaatatgatactctaatctagttttcataaacttttttcaaagttgaaaaaaaaactagcatcatggacagatgggttgaaagagtgaacggcaagaatagaggatcaaaactaggccatgaaaattgctcagttgagagctaatgaagccctaaattaagtcctaatcattgtagatggagtgggtgacagatttaaacaatattaagaggctgggcccagtggctcatgcctgtaaccccagcactttgggaggccaaggcgggcagatcacaaggtcaggagttcaagaccagcctggccaatatggtgaaatcccatctgtactaaaaatacaaaaagtagccaggcgtggtggtgcgtgcctttagtcccagttactcaggaggctgaggcaggagaatcgcttgaacctgggaggtggaggttgcagtgagcccagatcatgccactgcactccagcctgggtgacaaagcgagactgcgtttcaaaaacaaacaaacaaacaaaaaacaatattaagaagtcatattgtctagaattggtcatttctaggtgtcatggggttgggagaaaatccaaaattattgacagatcattttgagtgatggcatgaaaggcatctctttaccaagctggggactacaggaaagctggaggtttgtgggaaaaattataagttttgagtacattggatttcagatgcctctggaatatcatgcttatggagtggagattactatcaaaaccacaatctttaaaaagaactgcttctttaaacatgcttatattgtagtgagttcagtgatatatcctttggtagaaaaaattgtaaaaaaatttatgtatggcacatttctctgacgcttgcactttcatagtgttcactttctgttcacctaggtttacttactgatatccttctcccactctgaggctttgcctatcctgaaatacatttaaaaatttacccatgtcagaaacacttcccaactcatcctataaggccaatattaccctgataccaaatccagacagacataaagaaaactacagatcatctcttatgattatagacacagaaatcctgaggaaatacttccagaccaaatccatcaacatatgtaaaggttacatactatgtccaaatgggatttatcccagtaatgcaaggttgatttgacacacaaaaattaatgtaatatgtgaataaaagaggaaagaaaatcacatgatgatttcaatagacactgaagaaagcatttgacaaaattcacaccccttcatgattaaaaagaaaccccactgaaataggaatagaagggaagctcctcagcctgataatggttatctataaaaccccacggttaacattacaactaatggtttccttctacagtcaggaataagacaaggatgtccagtctcaccacttttattcaatcttatactgaaggttctagagccaggcaattaggcaagaaagggaaataagaagggcatggtggctcacgcctgtaatcccagcacttgggaggccaaggcgggtggatcacctgaggtcaggagttcgagaccagcctggccaacttggcgaaaccccatctctactaaaaatacaaaaatctgcctggcgtggtggcagatgcctgtaatcccagccacttgggaggctgaggcaggagaatcgcttaaacccagcaggtggaggttaccatgagccaagattgcaccattgcactccagcctggacaatggcgcgagactctctcaaaaaaaaaaaagtgggggagggaataaaagggcatatagattagaaagggagaagtaaaactctatttgtaaatgacatgatcttgtatataatgcttttatatagaagatctttgggaagaactaaataactaaatgaactaaatagttcagcacagtggcagtgtacaagatcaatatattaaaatcagttgtgtttctatacactagcaatgagcaatctgaaattaagacagtgattccatttataatagcatttaaaggaataaaatacttaggaataaatttaacaaaagagaacaaaacttgtactctaaaaattgtgaaacattgtggaggtaaattagatataaactgaaaaatagtacgtatttatggattagaagtcttagtattaagattgcaatactctccaaatctacagacttaatacaatccctgtcaaaatcccagctaacatttttgaaaaattggcatacttaaaattcatatggcaattcaaggagttcagaatagccaacaatctaaaaagagaagaacaaactggaggactcacacttcctaatttcggaacttactacaaagctgcagtaattaagatagggtggtactggcataggtagatcactagcataaagagtctggaaataaaccttcacatttacaaaaaatggatttttaaccaggatccaagacaattcaattgggaaagaatgatttttctgacaaatgatactggaacaactgtttatccacatgcaaaagaataaagttagaccctaactctcaccatacacaaaactaaattgaaattggacaatacacctaaatataagagctaaaactatacaattcttagaaaaatatatgtcaatctttactacttgggataggccaagcttttgaagtacgacaaaagaaaaatagccaaattagactttaccaaaattaaaaacttttgtgtctcaaaagatgccatcaagaaagttaaaagacaacccgcaaactgagagaaaatatttgccatttatatatccgttagtgtttctatctagaatatgtaataaaaaaactcatacaactcaataaaaaatccaattaaaaatagacaaaatatgtgaataggcatttctccaaagaatgtatgcaaatggccaataatcacattaaaatgatgctccataccattagtttttaaagaaatggaaatcacaatcacaatgagatactacttcacacccactaggatagctttaatcaaaaagacagaaagaagtattggcaagggtgtggagaaattggcaacctcattcattgttgatgggactataaaatgatccataccatttagaaaagtttggtagtgccacaatttgctaaacataagagttaccacataacctagcaaagctacttcaaagagaaaggaaaacatatgtttacacaaaaacttgcagttgaatgttcatcttagcattatatgtaacagcccaaaattggaaatgactcaaatgctcatcaactgatggatggataaacaacatgagatatattgctacaagggactattattcagcaataaaaaggaatgaagtactgatatatcctagaacatgatgaactttgaaaacattatgctaagtgaaagaagccagtcacaaaaaaatcacatatgattctatttatgtgaaatgtccagaaaagaccaatttggagatagaaaatggattagtggttgcctagggttgagtgggggactgggggaatttgagagtgttggttacagggtatggggttccttttagaggtaatgaaaattttctggagcaaatgtggtgactgttgcacaactctgtgtacataataaaaaccagtgaattttaggctttaaatgagtgacttttatggcatgtgaattatatttcaataaagctttttttcttctttttttgagatggagtcttgctctgtcacccaggttggagtgtagtggcgtgatgttggctcactgcaacctctgccttctggactcaagcgattctcctgcctcagcctcccgagtagctgggattacaggcatgcattaccatgcccaaaaattttttgtattttttggtagagaccaggttttgccatgttggccaggctagtctctaactcctgagctcaggtgatttgactacttcagcttcccaaagtgctgggattacagatgtgagccacttcacctggccctcagtaaagctatttttaaaaaggtttaaccacctcaccagaaagacgtgtatcatttgtcctagtttaagttcaaggcccccatttacaaatttttcactgattaatagtcttttcatgtcactacatagagatctccttccttgttttcagtgatgtgcacctctgggtctttgcactggctcctgccactttttcgaacactgttctcagaatccagcttgtttcctcactcttcgatttctctgtgaggcctcgctgatgaaatacacacaacaggaagcctgctagcacataccaccctgtgctcctggtcccctttcctgtttcactgtttaccacggcacgtgttgccaggggcaatgtatatttacttattcattgtctctacttcccactaaagtaagtgccacataggcaggacttttcgttccctgtttgtatccctaacaccctgtccttaatatcagtgcttggcatgtggtaagccataggctcttgtggctacacaacatgtgctctgttctcaagtggggtgattctgtcgatgtctggagaaacttcgggttgccatgccttgaggattaactaggtgctactgacatctagtagctggaggccagggaggctcctgaacactgtagaatacacaagaccaccctcaacacaaagaatgattcagccccaaatgtcaacagtgctgcggctgagaaaacctgtgttagaccagcactatccaatagaaatacaaccaactggtcgggcccggggtctcacatctgtaatcccagaactttgggatgccgaggagggtggattgcttgagcccaggagtttgagtccagccttggtaacacaacaagacattcaacaagaaattaaaagattagctgggcatggttacacatgcctgtggtcccagctacccaggatgctgaggtggaagaacaaattcagcccaagaggtcaaggctgtggtaagccgtgattgcaccactgcactccagcctgggcactgaggccacacttcctataggctgctcccagccagaaccgagcatgccagggtactagtgccacctgttcctgcaggacaagggaatcctctaacagtcaatagtccaccagagactcccaactgatccggccaaaagttcctagagctgtgctgtgtctcggactcctcctgccctaccttccttccttccccctctcccctctcacatggcagtctgaaggctctccctgatcactcctggcccctctcttaacctgcacacgtgcatccccaataaatctctgctgatctcatcctaacttggtgtctgcttctgggaggattcatactaacacaggtttcaaggtcggacagcattcaaatcccactcccaccacagaccctgagccagttcctacccctttctcagcctcagtttcctagcaatgaaaagaatattgaaacagaaactctttgaaagctcttcctgtcctgatctgttccagaatcgggctcagcagggttcctgcaaggacacaagtgtagctgcctctgaggagcccctcaggtgcccattttagccagtttgtttctccctgggctcctacagcacatgtgcccatcacacagggttgcaaacacctgttttctcctctgattccccaaagggtgctggacacctgtagaggggctctgttttgttcacttgtccatgatgctcagagaatgtttacagtgcacagtgaatgccgagcactggaaatgctcagtgaagcaagccaacaccagccccaccagctgtcagcaaggaggagttctgtggctatagtctctttggttccatggaaatgacaccaacagcccacataattgagggccctgtgcaggtgccgagttcccagcaaaagtctttgcatgtattttctgttatatgaatcctcctggcatgctcattgagaggttccattagtacatgcccatcttacacataaataaactgaggctcagggaactggagttgattgtcccagcctgcacagcaggaagaatcaaggggtgagttttgggttttattttgcatatttcagcagctttactgaggcataatttacacaccataaaatttactcacgataaatatacagttagatcagtaaatctatagatttgggaaaccgtcagcacaagccagttttagaacatttctattaccctgaaaacatttctcttgcctgtttgcaggcaatcttccattcccacccccagccctaggcaaccaccaatctgctttctgactctacagatgtgcctttttctgcacattccctctaagtgaaatcatatagtgtggccttttgtggttggcttctttcacatagtgtaatgcttctgaggttcatccatgttgtaatgtccattgtggcttcatccctgtctattgacaaataaagttctgttgcatggatggatcacaaacatctacatatccattcttcagctggtgcacatttgggttgtttccagtcttgagccattatgaataatgttgttatgaaaatgtgggtataagtttttgtgtgagaatatgttttcatttctcttggttagatccctaggagtggagttgctgggtcacatgataagggtaagttatacaaggaactgccaaacttgtctatgtaaattggttgcccatcagcagtagatgagggttccactgctccaaacagtagtgctgagattggaggcaagtccagcccaaccccagaaccccattacccagctctttggtgatcttttctaacattgggatacccagctaaggaatgaggatcatagctgtgcaggaatgagggctgtctgtgaaaacaagaagtgctcctgcaccagcccagacaaagaccccccacttatctccatttatttcttgtcctccaagtgatgctggagcccctgggtttccccacatacaatccctcaaatttctgacccctgctatttatcttccattgagccttaggttctggtgagagtaacaaggatagacaagggttcacagcccagagctagggatgccctataccctgggcagtgaccttggaagggctgattcagctggaactcaatattgaagcacctaggatgtgcctgtttacacacagaaaaaagataatgcagaagcatggggtccctgattagctgatctgagctgggctggggcttggcaatcattggatccagtgcttttcctaaaacatgagcattgagtttcctgcccacacaaccctgggcttaattaagtccaagcaacaaacagggtcctcagtatgcttaaagcattgacattggatggaagacaattcaatgtttgagaaatccctgcagaccctctgggaatgttttgaattctaaggagaccatcttgccctacttccttatttgacagaaatggaaaactgtggctcactgaggtggagtgaaataccccaggtcatccagcaaggtgagggtggagcaaaggcttggtcccatagcatatattcatccatctccttgcccatccattgtcttccagcagaatgtaagctctgagaagataaggattttcctctccttttctacaactgctgtcttccttgattctagcacagtggctggcacaggttgggtgctcagtaaatatctggtgaattggccaggcacagtggctcacgcctgtaatcccagcactttgggaggccaagacaggtggatcacgaagtcaagagatggagaccatcctggctaatatgatgaaaacccgtctctactaaaaatacaaaaaaaaaaaaaaaaaattagccaggcatggtggcgggtgcctgtagtcccagctactcaggaggctgaggcaggagaatggcgtgaacccaggaggcggagcttgcagtgagcagagatcatgccactgcactccagcctgggcaacagagcgagactcagtctcaaaacaaaacaaaaaaaatccagtgaatgaacccaagtgccctgacttctctgcttcatttcagaaagctgatctgagcacctactatgtgctacaagctgtggcaggtactggggataagatttgagcaagacaggacccttgccttcaaggcacttagttctcaagggcaagacggtaggtatacagctaggcacagaattctgtgactacagttttttaaatgctacaaagggatttggggcttgtgtaatctgaactcagccaggaggtcacagaagactttagaccaaggtttaaaataaagaggctgaggcaaggctccagtcccagagcatccccaggaggcctaccctgttcttccatgagtgtctcctgattggaaactcttgagtctaggaggtcaaggtgggaggatcactggaagccaggagttcaagaccagcctcggcaacaaggcaagaccttgtctctacaaaaaataaaaattaaaaataaataaaaataaaatgttagagagagagagagacacagacaccagcctaggtaacatggtgaaaccctgtctctacaaaacatacaaaaattagctgggtgtggtggcatgcacctgtggtcccagctacttgggaggctgaggtgggagaatcgcttgagcctgggaggcagaggttgcagtgagcaggaatcacacgattgcactccagtctgggtgacagagcaagaccctgtctcaaaagtgagagagagattgagataaacagcagggtctgactggagctaaattaatgtgctgagcctcgactaactgtcccacccactgagcagcactgagcacagagggtaaaccctgcaaaggaagtgaccagcttagagaacactgttcatcactccgaggcctgatgttaaccaccctgaggcttcatattaaacagaacacaataaaaatgttctgggtatgtttcttgtaaagagtcccttttttttagagatacgtattaaaatatttacagatgaaatcatataatgtctgcatgttgcttcagcataatattacaggggagaagggttaggctgatggccattagaacatgctgacggtacctgagttctgtgtatctttaggttaaaatttgtttcagctgggtgcggtggctcacgcctctaatccaagcaccttgggaggcagaggcgagtggatcacgaagtcaggagattgaggccatcctggctaacacggtgaaaccctgtctctactaaaaatagaaaaaattagccgggtgtggtgggggcacctgtagtcccagctactcgggaggctgaggcaggagaagggtgtgaacctggcaggcggaggttgcagtgagccaagatcacgccactgcactccagcctgggtgacagagccagattctgtctaaaagaaaaaaaaaattatccgaaaagtttctttaaaaaagcaaaaaatgtaaatatatatgtagatagatcaattacatgtggacctggagcagccaacgccattgcttctcgttcccaccagcagccaagactcctcaagctgaaatgtttgggtcagccacacctttgcaccatggcttcctttgttcttcctgaagtctttcctaattgtgctggcatacaggctttccagcagggaatcccctgtttcagaatttcttcctagcctgactaaagcctttgctggatcttataaatcacaagatttcacaggagatgcagccctggatcagatactcactaacacctcttgtcttcccttgagtgctgggaaagggatgctggagactgggaaacattttgccatttgcagtcttaggagatctttgtaaagatttctccctctggatggttttgaccagggcattgccaaattccatgtcccaagagtcttggtttctggatcctcctgagcctttgagtttcccatgaggccacagctgcaagggaggctgagccaagtggccgtaacaaccgggcagagtagcgggcagaagcaggggcagggtgcaagcctctcctccccaggagaggaacttccctgtgccaaggggaatgaagggacccaggggatgcgtagcagacccggtgccctacctcttttcatagtctaggttccccacagaccccttcatcagctggcttactgttcacttcaaggtcatgacatcagctgtgtgatgtggggacagaaatccctggcatggcctctatgtcatccctctgcagacagaggaggacgcaggcttggccgggatgctggagtcactgtggatatagaccctggcccatttgactcaagaacacatacataactggaaccaagaggctgggttaatcccctcaaggccctggccatttggaagaccctaaacctccttccaggtggccatgctaagcaaagccacttgcagccacccttccacgatgcattctacatctgagaaactgttgctgtcggccatcctggccatcatcttctgtggcatctgctgtcataagtacatgaaagtcaacatctcggagcagtcggccaccaccatgcactacaccatgaagatgctggccagtggcaccaataccatcttcatatccctgggcatctcgaccatgaacttgctcatctggacgtggaacatggccttcatcctcctgcactggccttcaccttcatgtaccgagccatggtgtcatccagtcctgactcctgtactgctattggatgatgcagctggagatcatagaccaggtggtcatgtcctatagaggcctgcatggggccatggccttcatcctggtcgtgcttccggacagaaacaaggtcaaggagaagaacctgtttgtcagcaccaccgtcatcgtcttcttcacagtcattttccggggcctgcccatcaagtccctggtgcagtggctgaaggtgaagaggagtgagcaccaggagcccaagctccatgagaagctgcaccaccatgctttcaaccacatcctcttggccatcaaggacatatcccggcatatcaggcacaactatctcagagagatgtggtcccactttgacaggaagttcctcagtggggttctcatgagaaggctaacccagaagtctcgagatgagatcctcaatgtcttccatgagctgaacctgaaggatgtcatcagctaagccatcagctaagccaccaagggagagtgcctaaggtccgtggccttcatcagctccccaagtactgataacgtcgtcaacatggacttcacgccatgatcgtccacaacggtggcctctgtctcttaccttctgagggagaacatcagtgccgtctgtctggacgttcagtccctgaacgtggcagacgttcggtatggggaggaccccgtcacgcaccacacgctgcagcagtacctgtgcaagccggggaaggagtacattcgtcgctacagccacaccaactgaggacgagaagcaggagcaggaaatcttcgacaggtccatgaggaagcacctggagtccttcaagttgagcaagctcgggatcaaccagaacaagaaggcagccaagctgtacaagccgaagagcgcccagaagcggtaaaacagcagcatccccaatagggagctgcccaggtagagccccgtgcacaatttcaccattcaggagaaagacttgcaaatttcagacacggaggacgcccccaactatgatgctgaggagacaagggacgggggtggtgtcagggcgagtattgggccccagcctcgtcgccagagtgccaccctggctgtctcctggggagatggtggtgtcctcacagagggcctgcgtgcagatcccccactctcctggcactttccgctgcctgacgcccttgcagctcagctacaagtcggtggactcattcctgcaggcagatggccccagggagcgaccccaggctgccttcccctagtgcacgcacatgtgacaccggctctgacatgctgctgactggacgtttgtcctgatgggccgccagctgcggcctccaagaagctcctgggcgcccccgcccgacccgcacctagggagaactcccaaagctctgtgcctactccggcagagccgcactaacgcgaacccgcgaacccgggccggggcctgggcctgagtggccatactgtgctgctgaagctggcatcgctgccgcccttgtgccaagcactgcgcacgtcctggggcaggagagacgccgctgtgaacacctgccaggccggaaatgccggcttgaagctggcttccaatggaatcgctgccagggaaaccaaccgaggcccgcacaaaatggatttgcaaaagtaatatcccaggcaagactccaggcccctcccagccctgcgcctctccctgctgacggtggggtgcgtccagagtgccagcactcagggtctgaccctggagggtggcaagtgggaggactaaagagagattggtaaaggggggaaaaacggggtgagcaagagggagagaaggttttgtgaaaagacagtggggagaaaagacagtggggaggaaagtttttgggtagatggagcgggaaaagagggtggcgagcaggaggcataaaagacggtggggagaagagtgggggaaaaggttttgggtagatggaggggggaaggtgataagcaggaggtgggaaggagggttgggaaaacgacgatggaaaaatagttttggggtagatggagggtgaaaaaagggtggcatgtgggagagggacgggagtggggaagaagagggtggtgagcaggagcagggagaaggctttgtgaaaagatggcgaggggggaaagacagtgaggaaaaaatgtttttgggtagatggagagggaaaagagggtggagagcagcaggggtcaaaagagagtggtgagtgagggagacaaggttttccgaaaagaccgtgggggaaaatgtttttgggtagttggatggggaaaggagggtgacaagtgggagaaggaaaaagagggtggcgagcgggagggagagaaggttttgcgaaaagacagagggcagaaaagaaagacggtgcagaaagaaaaacggtgggtaaaaagcttttgggtggatggaggggggaaaagaaggtggcaagtgggaggagaaaagagggtggcgagagggaggtaggaaagaggattgggaaaaagacgatggggagaatagttttggggtagatggagggcaaaaagagggtggcaagcaggataggggaaagaagagggcaagcgggaaggggaaagggctttgtgaaaagacggtagtgttgtcttatgtggctttacacatataaaatatgtttctattcctttccttctgaaaatttttaagtagtcacagtaagtctactcgtactataagaaatgaatctggtggggtgcatttgtaatcccagcactttgggaggccaaggcaggtggatcacctgaagtcagaagttcgagaccagcttggccagcatggtaaaatcccatctctactaaaaatacagaaagcagccaggcatggtggtgggcacctgcaatcccagcttcttggaaggcagaggcgggagaatcacttgaacttgccaggcagagattgcagtgaaccgagattgtaccactgcactccagcctgggagacagagcaagactctgtctcaaagaaagaaagagagagagagagagagagaaaggaaggaagaagaaaatgaaaaaagaaagaaatgattctaagttactgtttttaactgctgcagagtattctgtggtaggaacatacaatagttcatgtagttattctcccaatgatggacctttagatcattgccaatatctcactgctaccagcaatgttgctaagataatcttgactatactttcttgcacacacatgcaaatgttttggttttaatagatatgtcagatgccctccaaattggctgcactaatatgcactccctctggtgggacatgagggtacccatttgcccaactccggctaacatttattatcaaagttaaaaatacttgccaatctaatcagtaaaaatagcatctcaatgcccttttatttgtatttccttgataaatggtgagatcgagcatttttttcttagcaattttaatttcctcaaatagtattttcatatgaattgcctatttgcttttcatttgattttttttcttattgcccatttattatgaatactcatttgtttggactttattatctttgtggggttgttttgttttgttttgtttttttgagacagagcctcgccctgtcacccaggctggagtacaatggcatgatctcagctcactgcaacctccgactcccaagttcaagtgattctcctgcctcagcctccaaagtagctgggattacaggtgcccaccaagaagcccggctaatttttgtacttttagtagagacagggtttcaccatgttggccaggctggtcttgaactcctgacctcaagtgatccaccctcctcagcctcccaaagtgctgggattataggcgtgagccaccatgcccggcctatctttgtgttttctattgattatgctgtttctctttttgtccctgttcttgctttctgttgggttgattgaaatttctttgttccatcttatttcctttactggtttgaaatttatacatttcattgctatttttctaataaatactcttaattttttatatccatatataatgttgcctaacaaaatctaaaggtaaacagtacatatagactcttcccaaacaagataaggagtgttcacttcctcccactgttttccttttccccaactctcctgttgatataatccagaattctaattctaaattgttattttaagcatccatggcaatcaatactttagtcttaaataatagcattggctgattacttagagaagtgttacttttttcacactgcttcttcctctggattcatgtcatttcttgcaggaggacttcttaagaagttcttttcaacagaatctgttggtggtaaactttcttaaatcttgaatattcaaggtcaaaatctccttaagctgataggcaacttcagcaaagtctcaggatacaaaatccatgtgcaaaaatcacaagcattcttatatgccaataacagacaaacagagagccaaatcaggagtgaactcccattcacaattacttcaaagagaataaaatacctaggaatccaactgacaagagacatgaaggacctcttcaaggagaactacaaaccactgctcaatgaaataaaaggggatacaaacaaatagaagaacattccatgctcatgggtaggaagaatcaatactgtgaaaatggccatactgcccaaggtaatttatagattcaatgccatccccatgaagctaccaatgactttcttcacagaattggaaaaaactactttaaagttcatatggaaccaaaaaagagcccacattgccaagtcaatcctaagccaaaagaacaaagctggaggcatcacactacctgacttcaaactatactacaaggctacagtaaccaaaacagcatggtactggtaccaaaacagagatatagaccaatggaacagaacacagccctcagaaataatttacaactatctgatctttgacaaacctgacaaaaacaagaaatggggaaaggattccctatttaataaatggtgctgggaaaactggctagccatatggagaaagctgaaactggatcccttccttacaccttatacaaaaattaattcaagatggattaaagacttaaatgttagacctaaaaccataaaaaccctagaagaaaacctaggcaacaccattcaggacataggcatgggcaaggacttcatgtctaaaacaccaaaatcaatggcaacaaaagccaaaattgataaatgggatataattaaactaaagagcttctgcacagcaaaaggaactaccatcagagtgaacaggcaacttacagaatggaagaaaatttttgcagtctactcatctgacaaagggctattatccagaatctacaatgaacttaaacaaatttacaagaaaaaaaaaacaaccccatcaaaagtgggtgaaggatatgaacagacacttctcaaaagaagacatttatgcagccaaaagacacatgaaaaaatgctcatcatcactggccatcagagaaacgcaaatcaaaaccacaatgagatactatctcacaccagttaaaatggtgatcattaaaaagtcaggaaacaacaggtgctggagagaatgtggagaaataggaacagttttacactgttggtgggactgtaaactagttcaaccattgtggaagtcagtgtggcgattcttcagggatctagaactagaaataccatttgacccagccatcccattactgggtatatacccaaaggattataaatcatgctgctataaagacacatgcacacatatgtttattgcagcactattcacaatagcaaagacttggaaccaacccaaatgtccaacagtgatagactggattaagaaaatatggcacatatacaccatggaatactatgcagccataaaaattatgagttcacatcctttgtagggacatggatgaaactggaaaccatcattctcagcaaactatcgcaaggacaaaaaaacaaacaccgcatgttctcactcataggtggtaattgaacaatgagaacacatggacacaggaaggggaacatcacacatcgggtctgttttggggtggggggaagaggggagggatagcattaggagatatacctaacgtaaatgacgagttaatggatgcagcacaccaacatggcacatgtatacatatgtaacaaacctgcacgttgtgcacatgtaccctaaaactcaaagtattaaaaaaaaacacacacatacacacagactatgctcacaaagaccctttgccttacttcagaaaaagaggtagagctactattaagcccctaccctgacaactgggagactagaaatgagcctattataaagaattggcagcagaaaagggactaaagaagaattaatacttttaaaaaaatctcttgaatgtgtgtagtgctattagcactggggcaaaaagcctgatgcactttaagttccaaagtctttaccctgtacaaccttgcataataactaatgtccacaatgatgacactgggccattaagggagactaaattattcttacagtcctatatttaatcaagtaaggaaatatgtaatctaatttggaaatctttaagattcaaaataatgagagttaacattttgtgtgcagctagatatcttatcttgaagacagactttcatttgccacattcttaaacccttgagtgtggtctatagaagtagtcagaagtcatctcccatctggcccaaaattcttctcccattattctttggtttatgccacaaatataagtgcactattcccagataaggactatattcaatatccacagacagcctgttttgccatgacaaaacctggtccctttcagttcagtctcagaacagagtcacattcaagaagcagtttataaggaattcaaatttttacttacatttcccaaatgactgaaaggaattcaaatataaagtccggagtaaccttggtaaaggtgtcatctcgcctttgtccacttccctcacgtactgcatcttctctgggattttcagtaaatgtttttctgctcccctaccaataaggcttttcttccacctgaaatttctccccaatatccacctcctttttttgtctcctttatcttcttagccattcccatttgtcaaaagttaactcctactttagagtttaactcaaatacaataaaatctccttttcaaggaattcttcagtcctatcactgaaactgaattccttctcctactacattacaatgacttctttagttcacatccaagagtaacaggtagacttaaagaaaagataagaacaggctctagagccatcaatcctattttatttgtttagttaccatttattatgccccttctgtatgccacgcatgttgcatgcattttgcatgtgttaactctttaagtctcactgcttgcctatgacataattactataaacctcatgctttaagatatgataactatagtttaaagaaattaagtaccttgccaataatcacatagccaatgagtggcataaccaagtttcaaatccagaaatgctgactccagagctgaggttattaaccagtggggtggccatggaggagtgccactcagacttcctttaagagaacctgccacagtgagcatagttggatctgccacattgttcatactgttacagtaggtaactagtcagacatgagcagggcaggagaaagctcccactactcccacacacaccaaaaatgttacaccactatcacgtgatgatcaggcagttgttagctgtctctctaacataataattgatcacagctggtgccagggaaaggcagactcccaatagatagaaacactgaatctggtgatcagcagcttcccaacaagatctcaggagttgggtgagtgggctcaagcatgtgcattaagaggcaaatggtagagtttaactggtatatgaccttctaggatccttctatcggaaagagaagaacaccttaagtgagcatgcatccaactccaataaacacactgcacatgctcatttcccaagtgctagcaggtcactgcacatgtggacagcccaacccaagagaataatcagtggagaagggacacaagaccccagaagaatgccaacatacaaaactccaagtcaaaaggtcaaaccacacacttgatctctgaagttgcccagttggcccgcttcttacttcctttcattcctgctttaaaacttgcctcggtctctccttctgccttatgcccctccgtcaaattctttcttctgaggaggtgaaaattgaggttgctgctggcccatatggatttgccagtaacaataacaagatcatactttccctgggttaccccccaaaaatgactaagcacagcacaaggacaagagctgagccattcttgcccaacacaagatccctttatcaagcattctttgctgaggaactcctcgccagcctgactaatgctttctcaagactgcactgtagtgtgaggatcttccttttcaatcatgccttcctccatctctcctttcacaaataccatatctgcactgcagtctgaaggttcaccaaactgtttctgctcctttcccctttcccctaaataggtgtttttccattaaatctctagcacgcctgagcccatctcagcttctgctccttgaaagacacaggtggtaccataagtggtccaggaaaacaggtaatataatggggttccaggactggctcactcaccatccatttggcaagaaggactgcatcccaaatagaatatcaagtacagatagtccctggcacaggtgacaggccaactgctgaagttttcattgatgttgacctgggaagatgccctagtcacagttcaatgattcagtgggaacagctcaatgatttgggcatttgaaagatatctgggacctacacatgcaaagacagcagagctggtaaatagttatcaagttattataatgcttcacagggacatcatgtgaaagtgacgatgactggcaaccagctacaagctaagtgaggaaaccacggagcctctttgttaatttatctcttacaataaaaaagaagacatggccaaggagcagattcagaacttaatagttagaaatgcagaactccagagacatttaaatacacagccaaagtaggtcagttatactaaggccaggactctggttaggaaaagatggaaccctagaatatgggatggggatatctgagtggatggccacaaggattttggctctggagactatccagaccttgcagaggtggcccactgcaccacagtaagaaccagcacttcacttatgtggaagacactgcagaagctttaactccacaaggcaacaggtaacttccaaaagacatgctcccatctcctcttcttactcccacaccaccccagtgggtacgattatatccaacataacccagctcaggacacactgggcttcataagagggaaaggattatatatacttcaaaggaatggcaagaattacctaataggtacacacaggagctgggattggattggattgggctttggcttgatcaagaggccaaagcataagattggaaaaagaaggattcatggacttgaagacactttcttgagatgtaggatttaatgctctgggaagggtccctgggcaaggggcaaacttactactgagtgggatactagtttcccattgttgatgtaacacattaccacaaccttaatagcttaacacaacacatattatgtaacttacagttgtggagatcagaagattgaaataggtcttactgggctgaaatgaaggtgttggcaagctgcataccttctggagactctaagggagaatctgtttcttcatcttctttggtgtctagagcctgcttatgttctttggttcatggccccttcatccatcttcaaaatcaagtgtagcatcttcaaatttctcttcctctctaaccatcctacttctgtttttcacttacagggacccttgttgttataatgggatactgggatacacctgaataatacaggataatctcgctatcccaagatccttgatttatccctacctgcaaagttcattttgccatgtaaaataatatgttcacaagttctggggattaggatatagacacctttagggggagggggcattattctgcctacctcaggtaacttttttgaacctgaaaaagcaaaagcccacactgattgaagcagaaatacttagattttcctggaatatggaaaatacctggagactttgaagattattggatatatgatttgagttgatattaactcctggaaatatcatcaaagcatcatcattatcacctgttaaagtggagcttatcgcgtatcaagtaataaatgggaactggctaaagtctggcttactggggccccaccaggtccacaaacccgcctaatgctcactgctattcacctgagccagtgttgttgaacaacagcctccccaaagaaataaaataaaagcccaatgcctggtggtcctctttgtttctagagagagaatattccactcctactggccactgctctggccagtctacaggatgtgatacaagccggcctgccactggggccatatgagcctgcagaaccccgtggtgtgggagggatcggggataggatgagatgcattgcggagtgtatggcaaaccctaaggggatatttacaccacaggcctgtgggtatctagccaggccatatcatccacagtgaagaaacagctcccagctcattacggggccctgctattgatgaaatgcctgacacctgcttctcaaattgtctgaacccacagcccctctgttaaactgaatcacttgttccagcctccctcctcctggagctgagagatagtccaggggaggccaggctagaagcctagctgaggaccaccacacactaacacacgcagcagcccctccacaccaacagtgtacctcacctcaaccctctaccagagtgagctccttccccatcgagtacagggtgtggtgtttaaatgatttcctccaaaaccgagaggggttttctggaggagcttcactctaggagtatatttttccttctaccacgctcctcaactcctaaagcaagtagatctatggcccatttgccctggaatctcaagagctttgctccttgctctcaggtccctggcgcagttgttcactattctcccattctatgccattttacgaaaatccttcctccaagttcaccaccctctcaaggccacagcagcttacaggcagattctgaacatggaggattgcacaatcatcttgaaagtgaacaccatccacagctcacttctagccacagagttctatagcttcccctggaaagagaagaagaataaggaaagatcttctaacttgggaaccctaaagggaagagaggggccaaaaagcctacactagcacctaaattcaaaccaaacatacaattgggatgaaaagatacaattattttcataatgtttcataataagatttctaatccaaagtctaagctttcttcctatctcctcaaactttttcatcccccttttgtaagtccacaatttgaagaattgaagccagggggcaggacaaatgaattctacaacatagggcagacactcaagtttcctctacatacttcataaatcttgtcatctgctttcctagctctgcttcatagttgtctttgtggggttttatagacccataatactttggaataagagaatgaaatatccaggatctcatctggtactcagttcagcccaaagacataagatacactatttcctgttgatatgtggagaaactgagccacagaggcacagagagtgagggacacagccaggattcaaagagcccaccttgtcctgtcccctatcctgaagggaagctctcaaccaactttcagatacaaaggacccaaatagtcatcttaaaaaattagctctgggcaagtgaccttctagagttgcccgttctttaatatttgtttcttactggtaaggtacaaaatctgtgatctcttcaagagagaggctttggaagttgaatcccagataactgagtcataaattctgctttcatggctaagaaacccaaagcttaggagagacctagaggtgacatatcttatccaaattaagaattccttgcagacattctttctctccaagtatccctcaaaacagggccaactttaggagtagtaaatggctgtgtttttgaggagtgacacacaaagaccactcatcacaaacaggatacaatttccaacattcaaaggaacaaatcacttgcttctccaagaacctttaaaatgtctctatccgagggaaatgtcaactgaaaaggggggctcttgtgactctccttatcaagcagatgatcttgacctcaaccacgtgaaaaccaaaatgacctattgagaggccacataattcagtgggaatagcatgagcttagaagtcaggcaggcctgggttttaattctagcactgccgttttctaactatatgctttgtacaggttgcttcaactgtttcaactcctacgacctcctttgtaaaacaggaataacatcacaaggctgtaaggaggtgtagtcagttaacatggctgaagcccctagcacagtatctggcacctgagagaccagtattaggaacacattaaaataaacaggccatgttcaacaaaatgtaagaaacactgaattagacaaacttaaacaggtttcttgccttcagagcttctggaaacctgtgttgtcctaatgtgcatggtaaatcttcaagagagggactattatagcaattcccaaacatattggatcatagatcttttttcatggcactaacataaacactgctgaaaaaaccaatttggagcaaaacctaatagacccttaatggacattaatttcctcctttcttctctcacccagacttctttacctcctaaaactaacatacaaataagacacgttggtctttgtgacttcagcgacatcagaagtgtacgtttgggttttgatattttaaccttaaactctatcatttaaaatagtagttttatgaaaggaaacagccaggcactgtggcttaagcctgtcatcccagctacttcggaggctgaggcaggagaatgacttgagcccaggaatttgaggctacagtgagctatgatgacaccaccgcactccaatctgggcgacagaataagactgcgagacctatttctaaaaaacaaacacccccaacccccaaaaaaggaaaacaaatgatttaacgtgtattgacaagatacttacgaatgactgttatttatactgaatttttaaagatggctttgagaacctctccaaagagctcaatcaaagcactataattaagttcaggcaaattatgagattaaaatatatggccttaaataacaagcaaaacattttccttcattgtcatctggcctacctttacagtctttgcattatttcctgtccgattcagtagatggcactgcagattgaacatagagaaaatcccatagagttgctgtggattcatccttgggtgaatactgatttgttttgttttgttaaccctctctagtttcgatgttgttcatctgccaagaggggaacttgtgtattttgtgggagtgggatggggtaaagtagtgtaagtaatgattttctgcccctactggaaactctccctgtgcctcctaaccccttgaaaattggcatttatagaattccctagctcaagaaggccaaacacaggactatcatttgaccaccgatgtagacccggcccatatcagacagtgctaatcaccaccccaggcccgtgaccagacagtgctgatcaatcacagccacttttccactggagccaaacaacatttctcaattgttttcaatacacttttccaagcaactactataaatcccacaacaaaggcacaacgatgcaatctatttctaatacctgccggagagttcagagttttttcaagagcaaatccttaataatactcaaagttgttaagaaatgtatccaagcttatcagatgatttttgacagaaccaggacaagaattcaggactcttgactctcgcagaagagtttatattccaccctgacttaatgccctactgctaagagtcagactgctgaagtacagcccctgaggaccaagttcagatagccgagtacaaaaggtttgtctggactctggtggccccactcatcatttggagatggggaggggaagaacaggcagaaattaaacccaaaaacagttgatggcgtcctgtactatttgtgcaggccaattttgcgctggcccaagataatcctgctccatggacccagaagggcatagccctccagttgctcctccttcagggctgtccaccttcagttgcaaagaatttttatccattgtttttttataaggcaatcaggtatcaactatgagtcaaatggcaggtcccttcattaatattgcatttccagggacagctttttcagcttctgattttgtggtctaaacgtgttttggggaaaaaaacagggagaagctcttaaactatatcctgtgactttttttccccgaaaactactgatgatgtcagaatgagcattttcagttggtttgggggcatttctagatgaggttcagtcataattttaaatatcatgcatccaaaagtggtattgcctccctcagtctcattcctgattttcttctagcagttgaaactcttaaaggcactgctattctccagtcaactcagatttgaaatctgtcattttgaaatccccccctttcctttaccctgtttccaccaatcatactaattcttgtctgttctgcatctacccccttttttttaatgtcagtgaaatatttcaagccaatacaaaaggtcaaaataataatctaatggacacccacgtactcatcaagttctgtcaaatgtttgcattttgccaaactccgtggtatttttttaataaaagtcatgttgacaattaaaggccttgcaaatccatccctgattccatttatttattgctttagctagcaaatatttatcagtcattactaagtgctaagccctattctaggattggatgcacatcagtaaatgaaagaaagcccctaatttcctggagcttacatggcccagaagttacctccatcccaaatttggtataagtggtttcacacacattttctcatttattccattttatgttccaaaacagtatacactattatcatgcatgttttcaaactttatctaaagagcactttattaacatgtagtacatatgcttcttccacttacctttttgcttcacatgttgataattattttgagagctgtagctccagttcatatatgttaactacagtgttccattgtgtagaacaccattccctgttgaggaacatttaggttattttgcaattttcataaataaaaaacattctgtaatgaataagtccctctccccaggattatatttatatggcctctttcccactcattacacttgccaatgccttgttcctaagaggagttcagccaatatgtgctctcttgaatattcttctagagttgatcagaagtttattagtggaccactctatctttcagagagagtggagattcctctcctatcttcagagaagaatttacataatacaaggataagaaaaaactatccccattactaagagatacggttttattggaagaagtataaataaggttaattggaggaaaatgccctttgtcttctttggcacaaacttccttgagtccagcactcctttattcttcttatcagtatagtagtaatatctgcaatggtctttctcaaccctgactgcccattagaagccctgggaaaactttaaaaagcctgaccctcagtcactcatcataccaatcaattgagaatgtctggagtgggctcaaacattagtacattttttaaagttcctcagatatctgtaacatgcagccaaggttgagaaccatggagctagggcaggagtgatcctcaaattatgggccccagcatgctgctgtgtgctgagctctctgccaaattttggtcaatgtgcacaatttatttgcactcttactaaagatgcatgtagttctcagattcttaaaatgatcaccatttagcattctgtcaccatttgtgtagaatggcttactgcgctgaccatgtacttatgtaaccccaaggctaagtccttccatgttccactaaacttgtgacatttctctggcatcagttgaatgttgtcaatgcctcttacctacagaagattgagtgctctttacccctctacaacatgtcacacaatttttttcttggctcactgttctgacaggtgccattataatagtgtgttccctctctagtagtaaaaatgaattgcacgtatttactgaggtatacggtgttgtccagccccatgttctagaactaatataaggatctttttccatcttgaaacttgttctttatatcagtggttaccttttaatctcttaaaatgtattaccaaaaattcaactattacaaataaatcatgaagcttgaaagattaaaagccacaatctagagggctcatattaggttgtgaacagcaaaagggttcaaggaggctgcttcttctggttttagtgtacattcatgtttctcaaacttaggtctttctaggagttcaatggttatctataagaaatttataatgttgtattttgattccaagcaaagtctaaatatttatataagtgcaggactgttctccaggtggccttggactgaccaagttctcaccttcttatttgtagttcttaagagtaactagaatgtgctgaaagtgcaatatcctgaggaagggaggaattgcatggaatagcccaggccttattcctgtccctcctagggaatgtaacattttgagttaggcaagaactgcctagtacagcttaggctttgttcctctctcccctggaagcaggatgctctttgaagttttgcttagtgagccacattgcccctgaggtatataatccagaagaggctgcctctctgggtccttcagctgtagcacaagtgggacacgtggagttgaggcaccatctgccccaggaaggtttcttgaactttgggggactgtctcacaatgtatcctagacagagtcttgctctgttgcccaggctggagtgcagaggcacgatctcggctcactgcaagctccacctcccgggttcacgccattctcctgcctcagcctcccgagtagctgggactacaggcgccctccaccacgcccagctaattttttgtatttttagtagacatgggttttcaccatgttagccatgatggtctcgatctcctgacctcgtgatccacctgcctcagcctcccaaagtgctgggattacaggtgtgagccaccacacccgggctctaggcttcttttatcactttctgcctgtttgtaggtagtaaatctacttcatttaacttgttgcatatgagtgtgttctgtctcaccagctgcaaacaagttggtaacaagtgcacagtgaacttgctccataataagcacactaggaactatattgagtacttcttatgtgctagggatgctaagggtttaacatgcatatctcattaatcctcacaaggttagataaagtattacattagagttgaagaaaaagcatagaacacttattagctgggcctaaggatgcacagctgataggtgataaggataggactcaaacccaaagtgtgtaactcctaggcccacctttgtaatcactacactatgctattccttaaactatcacagtttactgaagaaagaagtgagatgggcttaaaagtaattgatgccttgtgccacgtgatgatcaactgatgccttggcatctgctcaaatatgaacttcatgatagaacaaacagagaagagtggtgactagaagtgagtcatcaaactcactatagcatagtggcctcaaaaggactcatacaagagaggtcaggaacatagtcacattacaagtgatttaatttctctaatagagcttcatgaaccacatttaataattattatttgattcttactggttcatagttgttcgtgtattcagtgttctttacttatttttatagttgtggaagattgataaataaaatgatttattcttaattttttctacatacttaactaatattttaataagaatttataagaaaatatgggatccatgaggattgtttttccttttaactccagttcatttatcactcaagtttaaggaacattgatgtagacttaaggacaaagatgcaccaaacgtcccaaagttcacagagggtccagtccttgtccccagggcttagggtccaaagcccctgtgtttcttgcccagccttgtgctctctgtttggatctagcaacacaaattatcaaggacagctgactgagcattcaggttttccaggaacctatttcactcccattttcttacctctataactacctaacttgtccatagatctagcccactgatatagtttagattttgtccccacccaaatctcatgtcaaactggaggacgggcctggtggaaagtgactggatcatggggatgaattttcttcttgctgttcttgtgacagtgagttctcacaagttcgatgatttaaatgtgtgtggtaattcccccttctctctttctctctctcctgccaccctgtgaagacagtgcttgcttccgcttcaccttccgccatgattgttaagtttcctgaggccttccagtcatgcttcctgtacagcctgcagaactctgagtcaattaaacctcttttcttcataaattacccagtctcaggtagttctctttagcagtgtgagaacagactaatatacccaccatcacaggtgaccatactttaaatgaacatcctacaagtagaagaaataatttcagagctcagagacaaggcttttgaattaacccaatcaaacaaaaataaagaaaaaagaatgaaaaaaaaatgaacagtctccaagatatatgggattatgtgaaatggcaaaacctaagaatagttggtcttcctgagggagaagagaagatagtaagtgtggaaaacttatgtgagagaataattgaggaaaacttccctggcctggctagagagctagatatccaaatccaagaatcgcagagaattcctgggaaattccgtgcaaaaagatcttcaggctatctaaaggcaaatagtcatcagtctatctaaagtcaatatgaaagaaagaattataagagcagcaggtaacctatagaagaaaacctatcagactaacagcaaacttctcggcagcaaccttacaagccagaaaggattggggtcccagcttcaacctccttaaacagaaaaaactgtcagccaagaattttgtatcccacaaaactaagtttcataaatgaaggagaaatggtcattttccgacaaacaaatgctgagaaaatttgtcactaccaaaccagcactacaagaaatgctaagacatgagttaagctatctaggtaacaacatgatgaagagaacagtagttcacatctcaatattaacattgaatgtcaatggcctaaacactccacttagaagatacagaatagcagaatggattaaaaaaaattacaatccaaatatctgctatcttcaagagactcacttaacacagaaggattcatataaactcaaggaaaaagggtggaaaaaggtattctatgcaaatgaagaccaaaagtgagcacaagtagctattctttttttttttttttttttttttgtagacacattcttgctctgttgccaggctggagtgcagtggcatgatcttggctcactgcaacctccgcctcacgggttcaagcaattctcctgcctcagcctcccaagtagctgggactacaggcgtgtcatgttggccaggatggagctcctgaccttgtgatctacccgcctcagcctcccaaagtgctgggattacaggtgtgatacactgtccccatccagagtagctattcttatatcaaacacaacagacttcaaagcaacaacagtaaaatatatatatataaagatggtcactatacaatgatcaaatgaattgataatcaattcaacaagaagatattataatcctaaatttatatgcaccaaacactggatctcccagattcacaaaacaaatactactacacatgagaaatgagatagatagcaaaataatagtagtgatagacatagcactagacagatctttgagacataaggtcaacagagaaacaacacacttaactggcatgctagaacaaatggacttaacagacatttacaaaacattctacctaagatctgcaaaatataaatttttctcattagcacatgaaacattcttcaagatagaccatatgatatctcacaaaacaagtctcaatcagttttttttaaaattgaaatcatatcaactatcttttcagaccacagtggaataaaattagaaatcaattccaaaagaaaccttcaagactacaaatacatggaaattaaataatctgctactgaatgatatgtgggttaacagtgaaataaagataggaattaaacattctttgaattgaaggataataatgacacaagctatcaaaacctctgggatataacaaaagtgtgctaacaggaaagctgatagcactaaatgccttcatcaaaaagtttgaaagagcacaaattgacaaccgaatgtcacacctcaaggagctggaaaaacaagaacaaactaaacttaaagctagaagaagaaaagaaataacaaagatcagaacagaactaaatgaaattcaaacaaacaaaaagatcagtacaacaaaaagttgattctttgaaaaaacaaacaaaattaataaccattggctagattaacccagagaagaagagagaagatccagataagctcaattagaaatgaaactggagacattacaaccgacaccatagaagtacaaaagatcattgaagactattattgtaactgcccagtgggttcaccttgcccgctgcctagacagagcagatttatcaagatatgggagttgcagtggagaaaaagtaattcatgcagaaccagttgtgcaggagaccagagttttattatgactcaaatcagtctccctgagcattcaggaatcagagtttttaaagattatttggtgggtaggggcttgagaattggggagtgctgactggtctgattggagatgaaatcataaggggtcaaagtgaatttttcttgctgtcttctgttcctgtgtgtgatggcagaactggttgagtattcttgccaaaagaaaaaaaattgacctgaatttaatcaaactgttagatctagctaatatgtaaaggaaacagcaaggatagaagaagaagttaaaatacaccatgaataaacaattggtcagaagaagcaatgggaaaatctactggataaacaacaggatttccttaacaaaaaaaggcatgaaggaagagatcatgagaaatgttatatattaagagtgacataagagacaaaccaaatgctatgtatggaacttgtctgcactctggttaaacaaatccagtgtaaaagacatttttttagataatcatggaaattcgaccacagactgggtattggatgatgttagggggttattgttaactttgtcagacatgagaatgaccctgtagttaagatttttttaagtcgttatctgttagaaaaatataccaaggtatttacagggtaaatactctccagctcaacctccctctccattccagagaatggtgaggagacagatgaaacaacattagcaaaatgttggtaccttctgaagtcggacaatggggtaggtggagtatcatcaaactattccctctagctgcttgtatgtttcaaaatttccatgataaaaggattttttaaggtctcagaatactcaatgacagtctaaggttggaatcacagtggaattctcacgatgcgcctcccatggtagaggcacagcaagagtaatatgtatggaaggggatcctcaggttccccttggcaggcttcatattccccagcaaggaggaaacatgatacttccacaggaccccactacattttctgctaaaaggtggacactgtttaaagaaaataaaaagcccctcaaagattggaagatctctcttcaatagggtctgtaaagcattctctattcataaacgcatttcctgaaatagaacatattcacatatttaaatgtaaagtgaatcacttacagaaaacactgttattactttctgcaatgcctttctacaatctgaatacaactgtcttctgccttaatttaaaactaggcctaccatttttttttttattttttgagacggagtctctctctttcgcccaggcctgactgcagtggcactatctccgctcactgcaagctccgcctcctgggttcacgccattctcctgcctcagcctcttgagtagctgggactacaggcgccggccaccgcgcccggctaatttttttgtagttttagtagagacggggtttcaccgtgttagccaggatggtctcgatctcctgacctcatgatccacccgcctcggcctcccaaagtgctgggattacaggcgtgaaccaccgcgcctggcctaggcctaccatatttttaaaagtacagcacaattcctttctggttttgcctccatgtaaacagaaagaaggactatacactgacatttcccctatttgctgcagagcttatagtacttgcataataaattagagaggaaaaagaccaactcagttcaactgcaactgagaagaaacatgcatagtgatacttatcctgattctgtcaacttgtaaatatgtataatagatattcagacttacccacaacccataaaagatgaatttccaaaattgcagaatatttattctctgtaaaattttagttagagctgcatcccagatgattcatttggcatttaatggtatgtaaattagttttggaatttactacagtctttgacaatgatagatgacattcacaggcaaccaatgatagacaagatcacttgccataaaatgactatgttatccaggaaagtaaagaagagacataattactggcccgctaaactggaaggcacccaagaatctcttttagtaggtgactaaaggggaagacatttaactattgaccagtgtatttatttccaaagcctgccatagcaaagtaacacagatggggtggcctaaacaacagaattgtctcatgattctggaggctagaagtttgagaccaaagtgtcaacagtgctggttccttctgagggctataaaaaagaatctgttccatgtcagcctccttgcttctggtgattgctggcaatctttggcaatcatttgcttgtagaggcatcactttgatctctgccttcctgttcacatttcattcttcctgtatgtgtctctccatgtgacattcttttttataaaaacaccagtcatattggattacggacccactttactccagtatgatgtcatcttaattaatcacatctgcaatgattttatttccaaataaggttgcattctgagatactgagggttaggtcttcaacatatcattttggggatacacatttcaacccataacaactcagagagtcaaaaaaacaaagaggccaccataccaatttccacaggtcaactagtaaagacctgctttctgattgtatgcaaatatgttgacatttgtcctaaccacagtagaaaaagtatataaatggtagccttcatagggctgtaacaggtatgctatttagaatccaggttccagatgctttaacaatgagatgatacagtgaaaaatgagatagaagtttattttcctttcagttaatcatctgagaataagcactttagggatgatttaacagcactgaactattaaggaccctgggatcctttatattattgccatcttcaacatgaagtttccatctctgggcttttgccatcatgtttgccacacacctattaagaaggaaattagggcaagggagttgtatttgtccattcttgcattgctataaagaaatacctgggcagggtgtggtggctcacacctgtaatcccaacactttaggaggcccaggagggtggatcatctgatgtcaggaggttgaggccagcctgaccaatatggtaaaaccccatctctactaaaaaaaatacaaaaattagccaggcatggtggtgtgcacctgtagctccagctacttgggaggctgagatagaagaattgcctgaacctgggaggcagaggttgcagtgagccaagatcatgccattacattccagcctgggcaacaagagcaaaattccatctcataaataaataaataaatacctgagactgggtaacttaaaaagaaaagaagtctaattggctctcagttctgcaggctgtacagaaagcatcgtgctacatctgcttgcttgacttctggggaggcctccaataacttacaaccatggctgaaggcaaaggggagcaagatatctcacatgatgggagcaggagcaagagagagcgtgagtggggaggtgctagacacttttaaacaaccatatctctccagaattcactatcatgagaacagtgcctagagaatggtgctaaaccattcatgagaaactgcccccatgatccaatcacctcccaccaggccccacctccaacactggggattacaattcatcatgagatttggtggggacacagatccaaaccatatcaggagtgtatgcccattacttttgagagtacaagaggaaagtagaacacatcacttctctcatctcattgaacagaacttagctatatggctacaaccggcttctagaggtagccctgggctatacaaaggctgggaaatacagtcctaatccatgaccagttaaaactatcactgtggaagaatgggagagcagattgtggtgtggagtctaatggtctctttcacagccagtcaacctaataaaactccgcaactccttataatccccttccactcttatgaaattgctgtcaagtttcaaaggcttaattcagtccttatcccttgaagcttctctacaatgtttgatataattgacctgcttggagttctttcttcctgatatagtttggctctgtgtccccagccaaatctcaccttgtaacccccataaatcccacgtgttgtgggagggacccagtgaaagataattgaatcatggggtccagtctttcccacgctgttctcatgttagtgaataagtctcacaagatctgatggttttaaaaatgggagtttccctgcacaagctctctctctttgcctgctgccatccacataagatgtgacttgctcctccctgccttctgccatgattatgaggcttccccagccacgtggaactgtaagtccattaaacctctttcttttgtaaattgcccagtcttgggtatgtctttatcagcatcgtgaaaacggactaatacactgccccttctcctaattcttctaattgtttcttcttagtaatattactttctggccctgcttctgttcatcttccttaaagtaagtggttccaaaaggcctgtcatccgaatctcttttctctttcttatatgccctcccttttgcaaagtcatcaactttcttgatttcaaccatcagtttgaagtttgatgcttcccatatatctgatctgttgccctactttctctccagtgtctctactccacatttcccactgtgtgctggactttgctatatcttgtcaaagtctcagacatccaaaactagatttaccatcatctctctgaaatctgtttccttttaccttggctcttgtttatagcattactataacccaaatgttatagagtttgggttgttgtaactgtcttctccctaccttatccagtcaatgagtatattgtgtccattgtaactctggagttttatacacccacacctttctgacctgttcctaaagccattgttcttgttcttgttctgacttcattacctcttagtctagaccattctactaatttctctcctcattctaactcttcctacactaatatcggggatgccaaagcacaactttgaaaaagatcagggaaagcatagtcattgtggctgaccatgataccagtctcaatggtagaactttttagttcctacaattttccagatacttacatgcaatatctcatataatactcagtaacacctaactaaattaacagctaagtaaattaagtgcatacatacaccaggcactgtgccaagaactgtaccttattttaatctcacaacctaaaaaggtaagtactattattgttctctttttgtatactaagcaactgagaggaagaaacaaaggctttacaaaactgagtaatttactcacggtctgatattggttaaatggtgaaactaggatttgaaccagttagtttccaaaataccctctcataaacattaacttaacctcatagcaatgatagaaggtcattattactattattatttcataaaccaaggaaattaagtaatcttaaattgacaagacttcaaagcccaagttctttcttttcttttcttttttcttttttattattgtactttaagttctaagatacatgtgcacaatgtgcaagtttattacatatgtatacatgtgccatgtttgtgtgctgcacccattaactcctcatttacattgggtatatctcctaatgctttccctcccccctctccccaccccacaacaggccgaggtgtgtgatgttccccttcctgtgtccaagtgttctcattgttcaattcccacctatgagtgagaacatgtggtgtctggttttttgttcttgcgatagtttgctgaaaatcatggtttccagcttcatccatgtccctacaaaggacatgaactcatcattttttatggcagcatagtattccatggtgtatatgtgccacattttgttaatccagtctatcattgttggacatttgggttgattccaagtctctgctattgtgaatagtgctgcaataaacacatgtgtgcatgtgcctttatagcagcatgatttataatcctttgggtatatacccagtaatgggattgctgggtcaaatggtatttctagttctagatccttgaggagtctccacactgtcttccacaatggttgaattagtttacagtcccaccaacagtgtaaaagtgttcctatttctccacatcctctccagcacctgttgtttcctgactttttaatgatctccattctaactggtgtgagatggtatctcattgtggttttgatttgcatttctctgatggtcagtgatgacgagcattttttcatgtgtcttttgactgcgtaaatgtcttcttttgagaagtgtctgttcatatccttcgcccacttgttgatgggttttttttttcttgtaaatttgtttgagttctttgtagattctggatattagccctttgtcagatgagtagattgcaaaaattttctcccattctgtaggtcgcctgttcactctgatggtagtttcttttgctgtacagaagctctttggtttaattggatcccatttgtcacttttggcttttgttgccattgcttttggtgttttagccatgaagtccttgcccacgcctatgtcctgaatggtatttcctaggttttcttctagggtttttatgattttaggtctaatatttaagtctttttaatccatcttgaattaatttttgtataaggtgtaaggaagggatccagtttcaactttctccatatagctagcctgttttcccagcaccatttattaaatagggaatcctttccccatttcttgtttttgtcaggtttgtcaaatatcagatggttgtagatgtgtggtattatttctgagggctctgttctgttccattggtctatatctctgttttggtaccagtaccatgctgttttggttactgtagctttgtagtatagtttgaagtcaggtagtgtgatgcctccaggtttgttcttttggcttaggattgtcctcacaatgtgggctcttttctagttccacttgaactttaaagtagttttttccaattctgtgaagaaagtcattggtagcttcatggggatggcattgaatctataaattaccttgggcagtatggccattttcacgatattgattcttcctacccatgagcatggaatgttcttctatttgtttgtatcctcttttatttcattgagcagtggtttgtagttctccttgaagaggtccttcacatcccttgtaagttggattcctaggtattttattctctttgaagtaattgtgaatgggagttcactcctgatttggctctctgtttgtctgttattggtgtataagaatgcttgtgatttttgcacattgattttgtatcctgagactttgctgaagttgcctatcagcttaaggagattttgggctgagacgatggggttttctagatataaaatcatgtcatctgcaaacagggacaatttgacttcctcttgtcctaattgaataccctttatttccttctcctgcctgattgccctggccagaacttccaacactatgttgaataggagtggtgagagaggacatccctgtcttgtgccagttttcaaagggaatgcttccagtttttgcccattcattatgatattagctgtgggtttgtcatagatagctcttattattttgagatacatcccatcaatacctaatatattgagagtttttagcatgaagggttgttgaattttgtcaaaggccttttctgcatctgttgagataatcatgtggtttttgtcagtagttctgtttatatgctggattacgcttattgatttgcatatgttgaaccagccttgcatcccagggatgaatcccacttgatcatggtggagaagctttttgatgtgctgctggatttggtttgccagtattttattgaggatttttacatcgatgttcatcaaggatattggtcaaaaattctctttttttgttgtgtctctgccaggctttggtatcaggatgatgctggcctcataaaatgagttagggaggattccctctttttctatttattggaatagtttcagaaggaatggtaccagctcctccttgtacctctggtagaattcggctgtgaatccgtcttgtcctgaactttttttggttggtaagctattaatttttgcctcaatttcagagcctgttattggtctattcagggattcaacttcttccaggtttagtcttgggagagtgtatgtgtctaagaatttatccatttcttctagattttctagtttatttgcatagaggtgtttgtagtattctctgatggtagtttgtacttctttgggattggtggtgatatcccctttatcatttttttatagcatctagttgattcttctctcttttcttctttattagtcttgctagtgatctatcaattttgttgatcttttcagaaaaccagctcctgaattcgttgattttttgaagggttttttgtgtctctatttccttcagctctgctctgatcttatttatttcttgccttctgttagcttttgaatgtgtttgctcttgcttctccagttcttttaattgtgatgtcagggtgtcaattttagatctttcctgctttctcttgagggcatttagtgctataaatttcaaaacagctcaactacatggaaactgaacaacctgctcctgaatgactactgggtacataacaaaatgaaggcagaaataaagacattctttgaaaccaatgagaacaaagacacaacataccagaatctctgggacacatttaaagcagtgtgtagagttctttcttttctttatacaacttcctatttatgttcctcagttataaatgaagttccagtccctgtgagatttcttgcattcgtggattattgacattaagagaaactgagaagagacaggcaacaagtcagcacaatacagtccacagtgtaggaaagccttccagaggttgtattcttctcatgatagtggaatcaactttataaaatcacagatactagtttcttgaaattccacttaagggtgtctttctccatgttatcatcactgtcccttggccatttaggggatgtggttggactttgtcctaagcttgcaattgctggattattaagttcttttgtccttttagcttattttggtctggaaaaaaagggtaaatcttttatactgaatatgaaaaatacaatgagacagagaaaatgatcaagtcaatgtttccagatacctgatttcagacagggatagtagatcttctattctcctctagctagtattgaccccatacccctaggcttctaatttttcattatggtaaaaaaatccagaaataggactaaccgaagctgggtccctgataacttggcagtatgcaggccaagatgctttgaattttatgtgggtggctcaaatttttagtattcacaagtatttatgaactcgtaaggctggaactctgaaccctatctaaagggagagaatggtcttcattggctatacttgccattttagcaggtacaacaaacaaacaaacaaaaaacaaaagaaatcatagatttggaaatatgaaattgacataagcaaaagaagtctcttaataaattcaattccatgggtttgtctatggacagggttatagccctgaagacagaaggatgacactaagtggtactggaaactgggagtcaaggtaagtttttggttatagaaagtgtattttattattagagcaaatggcaaatacattcaaggacattgatgttataggggaagagtctcaagggggaaaaatgctaatacaagtataaaaccaaattgctatttatgaaggtaaagtttggtgctgcctcactgtcaactctttccttatactctaactatagtcttgataaagtactcaatattccctctacatggaatagtctatttgcccagtacacaaacacaaacacacactaatacacacatacatgcacacaccattgcctttcttctagctaatttctacatatcttttaagtcttagcttatatgttatttcttccaggaaacttactgaaacatccccaagaccatattaggtgccctctctaattccctgaacaataacaatatgggtcactctgtacagtaattacctgttcatccgtttgctttgttcgttaaacgctaagttccttttggcagggaatagctttgccttcattattgtttcattcttaggatttagcataatttctgccataaagtatataggtgcttgatataaatctgttaaaggaacgtatacattttgcaatacagaaagcaatttttttcgtcattattccaatgtgtgttcttttccaaaatatattttctagagtaaaacgagttctaattatttcaaagagcagttaatttggatatgcagatattattgcttgcccactgtggtaacctttagggctgcttgcaaatatcctggttctgtcacctgcccagtgaaaaatgcacagtaatgtggaagcttcacgaactattgcatgattctccctgtcccttccccctaatcatggaagcacctgttcctgttccctcacaatggaagaatgtttagaatggaagtctctgtcagcctgtgaactcaaatgagatgtggaacagatccttcagctaaccccaatggacaggtcatgagatcaagaaataaatctctaatgttgtagcataactaatctgtcttgactaacataattttatgacagctacttcggctatctcttctttcttactatcagaacttgcctcactctctagaagcacaaaatactaaatattcttttttccagcttcccttgcaggtaagagtagctgtgtggcacagttctgaacaaagaaatagaaggaaaattcaacttgtgttcttactattttccaccttctaaaaggggattataaagagaactctctcctcccattttgctgctgcattcaattatatgtagacttgaggtagcgatcttttagctaagaggataagcctaagaattaagtcaatatattaagagccactgagtggctgcaccaaacctgaatttatcacttcaagacttactgctatgtgaggttataaatgtctttagtgtttggatggatgttgatcaggaatattttctgagttacagctgaatgcatactaacaaattgcataaggaatgtgcaaatttccctctccgataccctatcactctaaaattttggaagccaatataaaccagcaagtcaggttggatacccaggaagcaagagcatcatttggaagaactaaacacatgagaagttcatctagtgatgaaaccttttggctaaagatagaatccatgcgctaatcttagaaaaagacagtaagcttgcttacattggaggagaagcataagagggcacattagaaaaggacattcataagtaaattcattcttggtctttttgttcagaattagcgcatgaaacaatttcatagttagctacctgcctaggaaatttttttgcccaactagtaaaaaagagaaagaaaataaaagaaatgccaaccatacatgtgttttaccagcagtacatcttcagaagttagaaaggaactgataaagaagtggttcccttgtgcttcagtggttatttacaagtcatttgtatcactttccaacctaacttacatgtaatctaccaccttttgttccacctctttttttaaaaaagtgttcgtttgtctacattacctttcattagacaatacttttatgagtgtaattcttaatttattattaaataatccattgaatattgacaattttacacagtactcatcaaaaaatctagacctggaaaagagattattcagtgcttttcaaagaagtcaaaaaatccttaaaaccagagtaggcagggtacagcaaataaaatgcagacattttaacatgagaaacaaaatctccaaaattgttctcctacctacccaatctgccatattccactttttccaccaatttcaggagtttctgccacatggtttggctccagtgagccagtccctgcagcatccacagacatgaattggatctgtgtttttatatcaacagataagttcaattacttcatgatattcttttatgcacaggtaaagaactgatattgataatccaggaatttggttttgtttttacacatgaactgcgaacatagaactgcatgccctagaagaaatgacagctggtgagaaaataggtttctgtgcgttatctggagccaagagtgctaggtgcagaaggatcagtagatgatacagtggccaccttggtacagttgccagtgagctatcaggaatcacaagtagatttgaggaaagcttcaatagaaggaatagaggtagtggaaactgattcatgaacccttctgagtaataacaaatactttaaaaaaccatatcatgagttctaatataattttcttgtctggaatcagctactttcaggatcacttgttcttttaggcttctgaacttttacactgaagactgtggcgtcattagaaaaaagatcacaacacttggaatccctgattacctaatcctccagcagttaatgcccaaggaaacagcctctaggataccaattcatcaaaaagtgttccaggttcattctaattcaataaattatgttgagattaagttatacataatagatgttaatactaccattatgaatattgttattattttcaaacctcaaagtttatttttaaaatacagattgatttttttccctaaaatgctaaagcttttacatacatacaaaagtatgacctggggtttggaaatttgctttgcagtctgggagcttgtagttaacttaaagaattttaaatgcaattagtactttcagacaatcgatgtcagactgtcatatcttattctttggggtatgaagcaaggtattttacaatgcccaaaaataactttcaaaatagtatttagcaaactgtctggagcctctttccccccaaattagagtatccaacacagatgatacacaagatataacttgaagattactgattttttaaatgcctccccagaatttacatattaaatcgattattttctccttcataatagttaccttttgacacttacacattcaccccaagtacaaattcactaattatcaaggcctaggcactattataattctgggcatataaatcttaaatattctatgattgaatgggtccatgagtgagtgagtgagcaaatggtaaaagaacagataaattaatttagaacctctgctttgaggagtgctttcccagccagtaatatttttaatatctacgctaatggcaaaactttctggtttggggtgaatttgattaatgaaaagactcaaaaaatcatttggaataagtcttgggagtaagagacacaatccagtgggataaggacacttaggaaaacacaaggcatgatcaaaatattggaagtctgactttctcataattgtgtcctgaaggcaattccagaaatgatttgagcatccacagcggctctgaactaggcatgttaactccagaatgactgcttagaaagactatgttattttgaatgaaggaaaactgacatgctgattttctgtttctctaattaggctcatacattcatggtcaaggtttatatcatattttgtaaatgtgattagaagaaaagaccatttttcttatatgtaagatgaagggtaagactagatgatttctataaattttcccagtactaatattcagtaattctatatataaataaataatttaaacattgttcacattagtgagccattctcactaatatttcagaggttttatattgaagggactctcctttaaacaaccccaagacttcaagggaaatcatgctttaggctgtagaccacaagatatatggctgctggagcaagatatacgggacaaacctctctctctctctctctctctctctctctctctctctctctctctctctctctcacacacacacacacacacacacacacacacccctccaccccattagcagtaaactatctgtccccaaacagggacgattatagaagtcaacatggtagttcactagttcacattcatttgaaatcacttatataatgtgtagagagtaaagctgttctttaaatgatctatcaacttttcactaaatagttacaacttcaaaagccggggaagtgccttcaaatgaaagtatgacagcaggcttcagaatgtcctgcttccgattgtgtccaaaatatcttattctgtagattccaggctgggcagtgtctggaatatgccattccactgttgcattactcagacccaggagtcccttgtgccaataaaaactgttgataaaaaacaaacaagcaagcaaaactcaattttactcttaaaaatgtttaattagaaaaatacatgattattcatttaatgaatattcagagaatacctacaatgagcaaggcactatcaagacattgaagatacagcaatgaacaaaacagacaaaaacgtctattttctagaagagaaactttaaagaacagcaatttgtagaaatagctttacttgttctacctttctacctacctaaattatactcaccccaggaaaccttacctgatagccacaagatgtctctcctgctgtagaattgcaaagcactcttttagcccttatctgacacttattttcacatctagattcatttgttttctatatatatatatgtgtgtgtgtatacatatatatatgtatatatatatatagaaaatgaatacatgtcagactctcttctagaagtactgagggtacagtaaggagcaagatagatatggtcccaagtttcatgaagcttatgttctactgagttgaagatggaaataaatgcaataaacaaaaagcaataaatataaaaatcttaagaatgacaagtttagtgtagaaaacaagatggaagttttttagggagatgtcatttaaactgagtctgcagaaatctggaggaaaaaacattctaacaagaaggaacagaaaatacaaagtgtccaaagcaggaacaaacttgatgtggccacaaagcagaaagcaggtcagttggtacagggaatggtaaaccatggaagagtgcttgagatgagagaaacaggtggaaccagatcatgttggcccctgcagatcacagcagagagttcagacactcttctagactcagtgagatacaacgggctaactgatatcctcagttatgctgaaagtaaatctcttgggcacagagagtgtgctcgacattctgtgtttctcagtgatgggttcagtactctcaacaaatatttgattattctgctgctaatgaacaaggcagagatctaaacatatcctcagtattgactgctattagctaaaaactttgagcatttaaatataaatcattctttttattacctgtataaccttttcaacgataaatatacattacttgttttaaaatgtacctatactctacagctctaaataccaaagaaaaattttgcccatatttgtatatgggccatggtcaaattcctattttcaattaaccatctgaaccatactaacatatttacatttaacaaactaatatcacttagtttgaggcaatctgaattagacccaaattgccaaaaactgtacctacttccatgccactgtcatggaatgttaaatttatagacttgggaacagaagtattgtcttatttcagacacattatcaaatcttcaaaatatctattcagctcaggaatttggtagcaaaaggcaaagagatatgtctctctggagaaattgcctgaatatattatctcctcactcaagtcattaagagttaaacacccaagcttctagtgttttagtaactcaaatgaagaatcattgatcatatacaaacatgcaatacatgtcaggtatagactcattttccctatagaaatatcaagctctacagagacatctcaacacttttactctatactcctttcaaccaatttgcaaggaagctagttagattttacaaataatacctgtgtccatggggaaaaaaaacagaacagatgtctgtaagaatggaagccataacctcattagcacctaatcttacagaagcacacaccacactgttttgcagaaaaatgaatcaaaatgaaatctaataaatcaactaaatatgtccagaaacctccttgggaatttgatatcattaataccttgtactgagccagtcttttcatttgtcttcccagcattacaagccaactggtttcaaagcttgaaagacaaaaatattcaataaatgtgctcaccgagtctcccaggaggcatcattacacactatctgccacgatgttgaagtagcctcatatttctccacagtgaggaaggtctgatggttctgaaatgcaattaataaacctgatcaggtactgcacagtcacagaaggaacctgtttgtaaatactccccttgttgaccatatgttagcctaccaataccttgtgtgaaaatgtgttagaatttcatccaaattcttaggctttcctcttaacattctatgcaatgtactcagaatgttaatttatccagtctattaaaaaacatgatttttttagaaatgtgaaagaagtgtaattttagagttagtagcaaattttggaaattagggcagaaaagaggctgggaataaaacttacctgagattttaaaaaggtataagtcaagccttttcatgatatgtttattgatctatatatcccaagactttctctagtcacctcaaaagttagaagggaaaatggtaaagtttagtctactttccatctccaggtgaatgaattattagttaacgtacctccctgagtgaaagaattgaaaagaatacataaatcttccctatcctggggtactaaaggaggtctttagattttttataatagatttctagaaaccacatcataaaaagattttatttccccattggaagattattataatagaagaatttgtttcagaccaagaattcagcttcaaacaaagcacagatttgaatgatatgacaagttaataaagacaaaggctatacatttctagtatccttttaaatccttgagattgtgaccctaaaaggtacatgtctaattcacttatatttatcacagttctttacatctgtcatttactggtgctcaaataaccccttgctaaatgtatcacctatttacatgtgggccatgtaattgtttaaaattcttctttaagtattcaactgatgaattacattcaataaggaagttttcataaccataggaacctgtaaagagagttatttctgtctatttatggcaaatgacattgggaaggccttagatggagaagatatggtgggctttttgaatatgtctagagtagagactgaagaacaagtctaggcctctgaataccagggataaaacatatgacaatcttttcccaactgctctaccgtaatctcttccagatgcataattaggtactgcatacattaattatgcataatataagttactttatctctctaggcctcaatttattcatctggaaaataggggtaataaaacttaactcattgagtagtcataaggatggaattaatcatgtgataatgcatataaagcactttaataggaatacttgcaaatactacctgcaaaatagtaagcattccataaatagtgatgataactactaatgaagaagggtgatagaaattgttttataccaagtcccaaagcattctttgaaattaattctattaccactatagtagtttaaaggttttgttctcctgcttctccatggcaataatgatgatagaatttctctaccctagggatatcaggtgacagctaaacatgcagttttgatataacactttgatatcttcagaaaataatgttataaacatgtaactattgtggcacagattcacttactaaagaaattacttcaaacaggtgcatattgactacctaagaagtagaagactttcctccaatgtcatatttgagaatgtcatattgccacaattgctatcttggcaataatgacattttaaaaacaggaatgggaaggttcttttggaaggaaggtatttttggattataagtgactataggccctgggaagaacagctaattgatataaggaatgcatcctcagccacagtgaaaaccatgacctcgaaatcacagtcatatgcccactctttttccactataaattcctttattatttgaggttttacaactagaatgtgtccagttactgcttgtgtagttataagtatattttaaggaagttatagaagtatacattaattttattaatagatatattacatatgtatatagtttatcatacatatgataaaaacaaaaaagtctgaaatgctttattaaaaaactcttaacagctattacctctggaaagcaggtttgtgggtagaagagcacttatatattctattttctacacttctatattgttttaacattgggcatgtattttgaatgtcattttttaggtttaataaataaatgctctattagcaccagtagtaaataatagggaaatggccgatgcaagataaagtaaagcacatgcaccaggactccaagccaggagagtatacacccggggatctgtgaccgttccacaacagtacaggtaggaccagagatagtagtgtagaggaggaggagagagccaaaaagagaagaagaagccaaagacacacatccttcagttggccctttgactatttcacaacatttggtagagttctatatatttgaatacagtcatatatcggatacatcctgagaagtgcattgttaggcaaattcatcattgtatgagcatcacagacttagacttacacaaacttagatggtgtaacctcctacacacctaggctatatggtacagcccgtggctcctaggctacaaatttgtacagcccgttactgtattgaatgttgtaggcaattgtaacacaatggtaagtatttgtgtatctaaacatacctaaacatagaaaaggtacagtaaaagtagagtattataatctcatgggaccaatgtcataaatgcagttcatctttgactgaaacatcattgtatgtggcgcgtaattatatatatgggattgtattcaacttaacatcttcttgacagacaatgcagtcatacatgcattatgctatacttggtcctaagtgaagccaattatgtttcctgtgtgcttttacccagactcaatccacattaactacctattgaatattttcccgtacctacaaaataagatggaaaacaagttggaacattttgtctttatgttattaacctctagagggatatttaaatgaatgaatggctaaaaagtggatttacatttgtaaaagaaaatcattgatacctacctggttttgtactgaattcttcgggttagcacctacaaatataacttcagcaacttccccctgaaagtaaaaattcatttaatgacttctaataaaaggttttttgctatactcatattttggacattatttattataaattctataatttagggtgcctttatagattttgttctatttaatcaagtaagttatcttctaagaatattaacccttgcaacaatagacataggaatgtttggccaatgagtttgcttttggtggactcagatacaagtgaagatctagagctgtagtttatattagtgacagcatattaaaatggcttcttcaggccttgataattcctcacacctccctcccaacacaaatacagggaatatttgaatcaaattagaacagtcaaaactttccacagatgactcatatttatgcttacatttatagttaagcttttatttttataagagatggagtggcaggatgtgtatttatcctcccccctgaaacgactaaaaaactggaaaaaatatatattaaacaatggattttcaagtgacaaagaaagacagtgatatttgagtggcagcagacaaacaagaaccctgtaatccaccagctcaatgtcatcagagtttacgggccacggcagaaggaggagaattcaggccaagtctggcagtctaagttgaggatatggagctgggtgtccacaaaagccaaacagtcttgagtttatagcacagagcatcatagagaggatagctgcacagagacagaaatctggagatttgcagaaagctcccctcaagtttgcatgcatataagggaactactggaagccaggaaaagaatgggctaacagaattacagagaacagtccccaggctcatagagagttgtgacaagattctgttcccaccaggccagactggaaaacctcataattcaaaagaattttacattagtgtgtgaggggatgaggggtgctgggggaagtgaggaagggatttgctcaagatgaaaatctgctctggtcctgcctaaaaaatttagtaataggtaatgcaataggtaaaagcaataaaactaaatgctagttctttgaggacacaaattaccaaaattagaaagaaagaggggatatcattgtcaactcttcagaaattaaaaggattacaggggattatcatgagcaacaacaacttttatattacaccaacaaattaaacaacttatatgaaatgagaaaattcctagaatgataccaattcctataaagataaattcctagaaagacacaaaattgatgcaaggaaaaaaataggacatatgaatggtcatataacaagtaaagaaattgaattagtaataaaaattttgccataaagaaaagccaggtccatatggccttgctggtcaatccaatcaaatatttaaagagtaaataatgccaatcttttggatactttttcagaaagtacaagagaaaacatttcccaactcattctttgaaagcactattgccccaataccaaaggcaaagacaacacataaaaagaaaactaaaaatatccctcatggacatgagtagaaaactctacaatatatcagcaaatcaaattcagcaacatctaaaaaggattatacaccatgactaaatgatacggcatttatttaacatctgaaaaccaatgaatgtaaataccttattaaaataacaaaagacaaaaccacattgtcacctcagtagaaaaaaaattgcaaaactccaacactgatttctgacaaaaacttgcaataagctaggcataaaacatgaaaaagagaatctacaaaaaatcctaaagaaaacatcatactaaatggtgaaaaactgaatacttttctactacgattggaaacaagacaagagtgtccagtctcacaacttctatttgacattggattggatcttcagcaaaaaaaacaaagatgaaggtaccacacaacctgacttcaaaatatactacaaagctatagtaatcaacacagcatggtactggcctaaagtaatcaacacaccattggtacacatagaccaatggagcccagaaataagccctcacatttatgataaattgatttttgacaaaggtgccaagaatgcacaatggggaagtgacagtctcttcaataaatgctgctgggaaaactggatatccacatgcagaagaaggaaatataaaaattaactcaaaattgattaaagatttaaatataaaacctgaaactataaaacaactgaaagaaaacctagaggaaaagctccatgatgttggtgtaggcgatgtttttttttttttaatatgacccctaatgcaaaagcaacaaaagcaaaaacagacacatattacatcaaactaaacagtttctgcacaaccaaaaaaacaattaacaaagtgaggagacaacctaaagaatgggagaaaacacttgcaaactatgcatccaataaagagttaatatccaaaagatataaggtactcaaacaactctatagcaagaaaacaaatgacccaacttgaaaataagaaaaggacctgaataaacatttctctaaagaagacatacaaatgctcaacagggtatttttttaaatgttcaatatcagtgatcatcgaagaaatgcaaattaaaactacaacaagatatcacctaatacctgttagaatgtataatatttaaaaagacaaaagacaagtgttgataagaatgtagaaaaaggtaactcttgcacactgttcatgacaatgtgaattagtgcagccattatgaaaagcagcaagaggtttctcaaaaaattaaaaatagaactactgtaaaatatatacacaataccatttctgggtatatagagaaaggaaatgaaatcagtttgttgaagagatatgtgaactcccatgtttattgcagcactgttcacaatagccaagatatgaaacaacctaagtgttcatcaatggatgaatggataaagaaaatgtagtacatatacacaatggaatactattcagtcataaataagaatgagatccttacatttgatacaacatggataaacctggagaacattagattcagtaaaataagccaggtacagaaagataaataccacatgatctcacttatatatagaaccttcaagagttaaactcatagaagtagagagtagaatgttggcagaaggttagttaccaggggctaggaggttagggggttggggaggtattgatcaaagaatataaaatttcatttagacagagggaataagttcaagagggctactgtacaacttgatggcttcagttaaaaacaacatattgtgttttaaaaattgttaagaaagtctcaaattttctcacaacaaaaaataatatgtgacataatgtatatgttaattagctcaattgagccattccccatgtatacatatttcaaaacatcatcttgtacacagtaaatatatataatttttatttatcaagtagaaaattaaataaaattttttaaaaagcagaacattctattgaaggttctagccagtccgataaggataaataattaggtgcatttagaaaagaaatatagaaaggaataaataagcttatttttattcacagatgacatgatactatatgtagaaattcctaaggaatccagactcccctcttactcatccctcctccccccagaaaaactgttgaaactaataactgattcagcaagctttcaggacacaagattgatataaaatagtaatggtacaaattctgcttcatttctgtatgtttttcctatccttgacttaagagacaactctcagtgccagtgaatagttccatgatcattcacttaagaaaaggaataatttggattttagaatttcaatttgacacaattacttacaaaaaataaatatttccccattctcattacttttgcagagataagaacaattgtcaaaattatcattgctaacagttggtctacagcatgattagaggcaaatggtgacacaaagtgacatcccccaaaacatccctctaaaggattccaaggtctgctcatgagtcttaccactctgtattcaggttttgctggctgcaggacatccccgaaagttctgccttttggtgctctatccacaatactaggaattaatggaactattaattgtttgaaaaagggaggttctggacctctgctcaggttggctaccgtgtcctggaacagagagcatttgttaaggagtgcacaggtagagtcaaagaccctttccccaggcctccagacccagaaatgcctgcattaatggaagagtgcacacacacatatacatactccaagagctaacaaccttgagcaaaataggaaggtagccttgctaagcatgagcctagaaattcataatttaaactcttgtcactgggagaaagttttggtcataggcaactctttcattcccctagacaacataaggacagtgaccagagtacaaggttggaagcatactttcaaattgtctgactttgtacaggggcctaacatgcaaaaaggtaattataccatgacagtgtaattattattttaatttttaaaaagtattgagccactctcacctggagtgagtaccaagttttttcctagattcttgtctgtgctaataaaagaatataataaatatatttttaatttaaaatttaagatcatcccacatcctgactggtttaatctatattgcccacaaagtttaccatttttaatagtgtcataaaaatacaaatctcaattttcaaatatccctatatctatattaggttggtacaaaagtaattggcattttgccattactttcaatgaatatttaacgctctttattcctcacattatagatttaatctttacaactgcatatgagataggttatgtattaccattcccattttgcaaatgagaaaataggcttagacatattcagtggtttttttcaagatcacatagctagttttaaggtgcttgaccagaaatttgactgtaaaacaaatttccaccaaattaattgcatttttcttcattgtcactacaaaatttgaagaatctattttcttgggaagaactatagacctatgagcatagtgacagttaaacagtagttatctctagggatggattatagttttatgcttttctgtataatctgaatgacctacaaatagatttggattttataatagaaataaataaataaatacaaacagttattcaaaaaaagtaacctaaaactgagaccaaaattataataaaatgaaaataaatatcaattgattaaaatatgtgcaaagaaattatataaaatactgaaatttcaaacacaatcagtaactaataatacaggcatatgaaattttcaacgttcaattgatgcaacctacagagacaaccatttcattcatttcaacttaatatatccaagctctttcattaaaagggctttattttctttgctatgccacaattgtttcacattttttactgaggcttacatattattatataaggggctgcttattattttaagctctttatcttgtttgttgactaaccttctgacatcacagttgcagcttcataaacaactgcatccaaagggaagatttccacaagtgaagttcctttaaatcaagtaaacttgttcagcggtatatattttaggtagatgcaatgttttcattccaaggcaccactatttttacatcaaatctaagcttccattgatttaacaactcatattatcttttgaaccaccaagaaagtaaaagcatgctactaattataataataagcttcctctgattggaaaatgcatcccaatttccaagatattataatgtggaaaatgggcatcctagaatgctgacctactcaacttttggagtgagtggggagaatctggcaaggattagagaacacaggttcaactcccaggtgtagtaagcttcatcacttatcttcaagcctatgtgctcctctgaaaactggggagaaatgatatctccttaatttcacatgatggttgtaaaaatagtgagaaaatatatatgaaagaagctgccaccatgaaaggatgttaactagatccaaaatttggaaataaattttatttattttcttagagataccacaaaactataaattttgtaaaatataaaggttgtcaaactgaacactcgaagctaaggttctctttcacttccctctgcattttcttacccagacacagacacatacagacatacacacacacacacacacacacgcacgcgcgcatgcacgcacaaacaatatttgattaccgtagcaatagccttagcaaggtttctgaagagctgaatgtaagcagataatgtgtgcggtccataaattgtcgatgctgcctcatatcgctgagcctgcaggaaaggcagggagagttgtatatggttctgcttatttaaatccatttacagaggtgtagcattttgggtaagtgtgatgcttgacatctcacattattcaaaactggcacaatcttcaagattatgtatgacaaaagaggatgggcatttccatttactggccaaggtaagtgactcctatggactacctgttaaaagcagtgggttctctcggcttatgccatttagactgtcactctatttactatgaaagagggtgctagctcctaagctttagtctattataagtacttgtaatataagtgctttcccccagggcatatatcagaagaaaaataaaacaaaataaagagtcctagtaacttctggataaatagttagaaggtgctaactggagaaagacatttaatccatcacaaagccatgaaattgagccaaatgcatcttttagctgacctccaggcctttggttcttctacaggaatttcaaagttatcaaatctaaaaccaacctcaccacttcagacataccagcttcctccacaacattctcatctcagcgaatgtcatctttccagtctcccatgtgaggatcagccggcagttaccttagactcctctctccctcatcctgtatcctatcagtctccacatccggtaattctgtctccttcaaatctcctgagatctttcattttcctgtcttactttctcctaaggtacaaatagatttcaccttagttcaaaccctcatttctcacccagatctctttttttatatttgtattaggttcagaggtacatgtgcaggtttgttatataggtaaatcacatgtcatgagggttggttatacagattatttcatcatccaggtaataagcacagtacctgataagtagttttttgatcctctccctcctcccagccttcaccctcaagtgtgcatgttcatgtcttgcccagatcttaattacactatggcttcttaatcagtcctctgcctatacacaagcccttccaattcattttctacactgccatctattgacctttctaaatcacaaaattttatcaaagcattctcttgcttagaatcctactgcagttcccccaaagccttccttactgagtgaaggctcagtagcatagcatgcaagactatccatcagctaacctgtgtctcccactctggctaccatctccttaccatcaccctccgcatacttactccatgctactcaacgaattgtggtccatcaatgtgcctgccctctggacctttgcatatatcgtttcttctatataggatacattcttactctttatttgcttaactctcacttgttgtcaagaactcatacagatgttacatcttcctgaacagtcccagtcctcaaatacccagtctgggctggtgctctttctctttatttttataacaccttgtgcatgcctttcatgaaaatgtaatcatctgttcttttttctgtcttcctactagacccccagcttccagtgatcttgagggaagggacagattcttttcatcattatgccccagaaagtggctagcacagtatctgtcacaatacatatctgttgaatgaatgaagtaattaatagtaatacttgctggagtatatccctgtgatatggacaggagacaggaaaatattgggtagaagagagtggttccctggcaaaggccccacccttaagcctggaaacctgtggccctaaacaagaacaagcatttctgcttttgcaaccaaacattcctgttttgcctttttgttcactacgcccccctatcctgtacccatataaaccccaaacccccagctccacaaacagacaaggagatgaacagaaaagcagaatggcagaatggcacagcagagaaaagagaaggagcatctgaactctgagaggagttcggctgtggatggttggagaagagattggccactggacagccaaactccaggggaagatcatcttcccacaccatcccctttccagctccccattcatcccacggagagctacctctaccactcaataaaaccctgaattcatccttcatgtctatttgcaacctgattcttcctagacactggacaaggacctgggtaccaagagggcactgagctgtttaacacttaagctatctgcagacagcaaagctaaaaaagtgcactgtatgtaatacatgcccacttgggcttctggagtagcaggcacccatacctagatactgctgcagggaccacatggaatttgctcctgccagcacccaaaagcacttaccttggctcctgcacctgcctgtctgtatgctccccttcccattaagggtttgagcatatacagcagccaaacagatgagccacacccctgttgcacatactgcaggggggttcagggaactttcccatctcacctggaccaggagacaagctagtaggggttcctaaccttgtttgtgacatggactcctttggcagcatgttgagacctaaggacctccctcagaataatgtttctaaaggtgtaaaataaaatacatggaattgacaaaggaaaccagttaggttgaaatatatttaccatactataataaaccaatgttgtgatacagtaatgtatgtgcttctttattatgctattgaataacaagatatatctgtggatctaataactattgtgattataaaatagcaataagagtaaaagacatttctagacctgcaatcactgtatgtgatatgaaaatatctgtggtgcctattggtgacagaggtactgctaaaataatttgtttgtttcctatatttataattgactgaaatgcttaataatagttagaggtagtgaagaaaggatgtaattcttcctatccaagtttagcatcattaagatccctttttcaatgggaattcctagaaggcagggaccttcaggaaagccaacagagggtagcagggcagagtctactcttagtatcactgaatatttaccaaggggtagactgtatgcctctgtatgcactgctgttatataccagcagatatattattaacagaaattattaattatgagactctggactgttttcatgttttacttaaaaagtacttgggctgctttctggactatttataaacaatgaaatattaccagctaccagcctccctcaaactctctgggactctgtttcttgatatatatcaatataataacaccctacttctggatatactgtgaggattactttaaataacatttgcaaagtcttaaccagtgcattcaataaacagctactagtaggagttttctccagtgctacagaggcttaaggcatcaaatgcattaagaatagtgttagaaatgttttatgccacaacccaggcttgttaccaatgcccctgacaaaataattaatttcagggaaaatgtaagtcagtaaaactagaattctgacctggacttaaaatgatgtatttgaaactcttaaatacggcctctggcttatcatcctcttacctgttatacctgaaacataatcatctctcagaaacatgactgggaaagtttacaaagcaagtctgcatttgacacaatagtctttactggggtataattcatttaaatgatgaaaacgttttgctttacctggtattcttcataagtggtaatgtaatgtgtatagacgttgcatagacctgaaataacaacagtcatgttctgcatcccatgagatgcaaattcctaggagagaaaggtaaaacccaataaaattactcttcatctttacgtatattttcattctgttatccttaacacacaagcattgattacactattagtttaagatatttttcttaataaaatttttctaactctgcactacagttggacaagtcaatggatctacaaataccttgatgatcacagttgcagatgtagaaacttcttactactaaaatagggatttaaaaaatcaacttattacaaaatctaatgggtggctattagctaaccagaatagtaatttccagcgctaagtaacaagacatttttgacatgtcattttagaaccatttacaatactgcctgaatataaagaaaattcaaaatacagcacagataaaatacagaattcccaaaatgtaatacattttatttagactgttcacaggaatttaagatattgaggtacttagaggttacttagtatttaatgtatacaaacattatcaaattttaaaatattaatacataaataccaataaaatatttttaacctaatgataatgcccttatgttttttaagtctggttcttatactaccaatatttcatattaaccttagccattaatttcaagaaatgtggaactctagatataggatcatagggataggatatactttcctcttcaccaaacatgaacatgtagatatgttattttatttttaacttactgcttgaactgcctctcgaagtcttcgtccagacatggtcctgagtcaagaaaaaaattatgtaaacgttttcctactagacgtatgcagagtacacagaaacactggcagtgaaagccaaaaaattaccctggctcatcacacaatagtaaaatatgtaggaacccaatgactatgaaaagctaaacttgaactttttttctgcctgtcctagcttcaaaataaatcctaaactgaaaacagtcaatttgactaaaagaaggaaacagaatcagtggttatcactggcaaaaatcatcattattttccattcttgagtcaacaaaatgatcagttgcagtctatgtttataaaagctgaggtaggtagaaaatacattactgtataagtgtaataaagccaatgtggctgaatcagaggtgagtaaaggggagagaggtaagaaatcagatatgagagcttgatgaagaacagatcatgtaggagcttgcaagtttgaggatttacctggaatgaaatgagaagctactggagggttttgagcaaagacatgttattatttaatttatactttaaagggcttaatctagctgctgtgttgagaaaaaaaaactgcagaggagtaaaggcagaatgaagcagaccagacagcaggttatttcaaaaatctgtgtaaaagatcgtggtaacttagaccaggaagggaagtgacagaaggtgttgggtagagtgtacaaaatttgctgaagaatttaaagaggaagaaacagaaaaagagggaattcaaggatgactccaagagataggacctgctggaaagatataaaattgccagttactgagataggaagacaacatatcaaggagttttaaaacattcttccatgcttttaatacctaatctgattatttcaagtacctgtattttaatatgactgcaaatctttctactgatataataactcatggcatcattttaatttgggataagttttttttaattttcatgtctgcctcaggtgagccatcaataataagcatagagatagttattcttcagaggccccagcaaaagagggtaggaatatttgccactgtcaccaaacagtacagtaggataccaaggggtcaacacagaatgatcttttcatgataagaagcaattccaacagaacatacaacaaacacatttttaactaagtaataaaaagaaaaacttacgtaaactccccggggatggcagttatggccaaggacccaagggtaataatctgaacatcaacaatgtctggatgccaggggtgaggttttgatagctgagaacccaaaacaagaaaattatgttagggataacactctctctatggtcaacagacatatagtggtcccagaatttcctctagtttctaatttatgatgtagtattaaatattctatatgggcatttatgtcctagtcataacatgagaatttcaaatgccaaagccccattaacctgcagaaatcaatgaagtttttggtggatctgtcatcgtgaaatcacaatgtgtaacagataaccaaacattttcctagagtactgttggtgactattcttatacacaataaataaggaattccatttggaatagtttaacttaataatttctctttttattataatcgcactttaagtttacagtttccaagtcttactttattttccaagatttctcccaagagaatttaaccctttccttattcagaatactatagcctgtccctctattccttcctttcctctcttctttcaagaattttaataggatattagggaaaaatgtatttttaaaatgcttctaactcaacaatccaagtttttatgaatactgaaatgaccttttgacatttagaatgcaaaatatatgtttcaaaggagtgtaaaagaaaattgctttagttgataatgttgcctgaactgtgagaaaatttagacaggaacatgttttgttttagatgacctgaaatattttcttctgcagaaaatttggtgctgactcccttcttggaaccaacaaaaataaattctgagtaagataaatgttcatcttattctgcctttcccactgtcctaattgttgtatttattaatcataagtgcaataggtaaatcaatataattcattgccataaccttcattccttagagtcatggaacccattttttaatattaaaaacttgatatgggaatatctaaataagacttcccatctcagtagatatctaccattcattacctgacagttcacatatttaaaaataacaatatgctaatttcactatgataacgaaaatgcattacttctccggtgtgaagaaggatgggctttggtttatgacattctttaatttcttcagatggctttcccaggatctggtcccgaatggtgtcccaaaatggatccccttctgttttccctattagaaatgttataattagtatacttccttgaaccaaccctctcaaaaaagtcattatcttgacaaatattgtacaataatcttttaaggagtttcagagattttattgaggttgttgttcaatgattccaaacagtttgagtaatagaatagaaaaaatgtcctgtgcatcctaagacatgagccattgtttaattagatcttcagtgtggtcaagagaacgacagagtatattttgtcaatgtccttaaagttttgtttctattactcctgctcattcatgttgcaaataaaaacagtttgacataattaactgcagatttgtggactaaatcacttttttcctgttttgaaaatgaaaaattacgcctccaactcacaataccagttgtctgacttatggtccctgaaataatttctcctgaatttagttatctacacacacacacacacacacacacacacacacacacacacacacacacaaagcagtaaaaaacaaaaataaacttcatatgcataatctggggtaaaaggttttgtaactataaaacttatgaattaagaatctacactctattcaaaaaatgtaataattataaatgtctgtgtaacataaactgaaaactcacagaaatgaagaaagaaatacacatttcagtaacaatactgaaattttcaataacccactctcaatcatggatagaacaactaggcagaagatcaacagaaaacttgaactagacctaccaatctatagaatactccacccaacaataacagaatatacattcttctcacgtgcacatgaaatattatctgtggtagatcatgtgctggctaaaagacaaatctcattaaattttacaaagtagaaataatacaaaatatgttttccaaatacagtgaaatgaaattaaaaataaaggaaaaaatggagaagcttgcaaatatgcagaaattaagcagtatgatctgaaatagctaataatcaaggaagaaatcaaaggaaaatctggaaatactttatcatgaatgaaaatgaaaacacaacacatcaaaacttatggtatgcagtgacagctgtgttcagtgagacatttatagttgtaaatgcccatatattaagaaagaagaaaaatctcaaaccaataacctaacttccacttgaagatattggaaaaggaaagcaaactaaatcaaatgttgaaaaagaaggaaataatcagtattcgaaagaaaatcaattaaacagtgagtagaaagaaaacagaaaaatcaatgaaaccaaaagctggttttttgaaaaggtcaacaaaattggcaaaactttagctagattgaccaagaaaaacagagagaagacttaaattattaaaatcagaaattagaatattaatactgactttaaagaaataaaaagaattataaaggaaaactataagtagttgtacgctaacaaattagataacttagataaaatggaaaaatttctagaaagacaaactaccaaaattgactcaagaagaaataggcaatctaaaaaaaaaaactataaaaagtaaagagattgattcataacacatttttaactacttacaacaaataacagagccagattgctttactgctgaattccaccaaccaaagaattagtactagcttttccaaaacttttccaaaataatagaaaagggaacacttcctgattcattctatgaggccaatattatcctgatataaaaccagacaaagatatcacaagaaaagaaaactacagaacattttctctgataaataggacacaaaaacctacaacaaaatactagcaaactgaatacagcaacacagagaaagaattgttatagaacatgaccaactgggatttattccaggaatacaaagttggttaaacattcaaaaactgattaatgcagtacaacatattaatataattttttaattacatgataatctgagcagatacagagagaaatatttgccaaaaaactaataccattttatgataataacactcaacaaactaggaatagaagtaaatttcctcaacctgatgaaggattaaaaacccagagctaacattatagttaatgatgaatgactgaatgctttttccatactattaggaacaacacagaatatacactcttttcacttttattcaacattgttctgaaggttctaggcaggcaattaggcaagaaaaagaaataaaaggcattcagattggaaaagaaaaattaaaactattaatatttctattttaagatgacatgatcttgtatagagaaaaatcctaaatcatccattaaaatattagaactaataaatgagttcagcaaggttgtaggatataaggtcaatacagctatctgttgtatttctatacattttctatgaacaatccaaaaatgaaattaagaaaaaatttccatttacaatagcatagaaaagagtgaaatactaagaaataaacttaacaaaaaatacaaaatttattttttgtatttgtcttaaaattacaaaacattgttgaaaaaaattaaagagggtctaaatgaatcctaaaacatctatgtacgtggatcagattacataatattgttaagatggcaatactcccccaaattaatctgtaaattcaatgatattcccatcggaatcccagctgacttctttgtaaaaatttacaagctgattctaaaattcctgtggaatctcaagaaattcagaagtcaaaacaatcttggaagaggaggacaaggtagaaagacatactttctgatcttaaaggaaacaataaccaagagacggttatactggcacaaggttaggcatatagatcaatggaatagaattgatcatccagacataaagccatgtgtcaactaatttttaacaagtgtgccaagattatagaatgggtaaataataatctttccaataagtggtgctaggataactgaatagccatatgcaaaagaataaaggcaggccattacctccatgatacacaaagtttaactaaaaatggatccaagacttaaatgtagagctaaaaccataaaaatcttataagaaaatagggggaaatcttcatgacattgaatctggaaaaagattcctatatatgacacaaaaccatgagtaacaaaagaaaatttagacttcataaaaattaagaatgtttgtgcttcaaatgatacaatcaataaagtgaaaaaacctacagaatggaagaaaaaaaattttttttgagacagagtctcactctgttgccaggctggagtgcagtggtgcaatcttgtctcactgcaacatctgcctcctgggttcaagcgattgtcctgcctcagcctcccgagtagctgggactacaggcgtgcaccaccatgtctggctaattttgtatttttagtagagacagggtttcacaatgttgaccagggtggtctcaatttcctgacctgatgatctgcccacctcagcctcccaaagtgctgggaaaatatttttatatcacacatctgataagggaacgtatacagaatacacaaagaacatttatactcaataataaaaagaaaaataacccaaattttaaaaggagaaaactacgtaaatgacatttctccaagggagatatatatgtggttaatacgcacatgaaaaggtgtttgacatcattaattattagggaaatgcaaatcaaaaccacaatgagatatctctccacacccactaaggtagctagattcagtaagtcagataataacaagtattggcaaatacattaaaaaatcagaaaactatacactgcctgtggaaatgtaaaatggtgcagccatttcagaaatagtctggcagcttctcagatgattaaatatagagttatataatccagcaattgcactcctagatatatacccaagaggaaagatgaaaacaaacacccacataaaaatcctatgaatatttatagactatttatagattcataataaccaaaacatgggataacccaaatgttcatcaactgaggaaggtttaaacaaatctgatatgttgatacaatggaatattattcaaccataaaaaaagaatgaggctgggagcagtggctcacacctgtaatcccagcactctgggaggctgaggcgggcggatcacttgaggtcaggaattccagaccaccatggccaaatggtgaaaccccatctctactaaaaatacaaaaattagccaagcgtggtggcaggtgcctgtagtctcagctacttgggaggctgaggcaggagaatagcttgaacttgacaggtggaggttgcagtaagctgagatggtgccactgtactccagcctgggtgacaagagcaaaattctgtctcaaaaaaaaaaatgcatgctacaatgtcaatgaacctttgaaagatgatgctaagtgaaagaagccaacaaaaaatgccacatattatatgattccatttgtattaagtgtccagaataggaaaatatggagacagaaatattagtggttgcttaggtctgggggcagcgggtgcggtacatggtcatgtacaaacctggaaaaccagcagaccctgagtttaaaaattaataaatgtattggctacaatgaaacctgatcagagaacagaacccagaagcttcagaagctgaaaccatagattttactggacttcaccttaccctgtgtaaaattgaggcctccaactccatcaatagtgccagccgcaaaactgtagcccaatgctggtttacatgtttttgactaaaggaaaagttttaaaaacaaaacaaaaatgaaaaagacaaaagttaaactgaaagtaaataatgagatcaaaccaaaacttcacccttggggcataaccagtgtgtctcagcagcacttactgcatgtgtggaattgagccagacagtcacatctgtcatatccacccactggtgtgctgaagccagtggtcctgttacctcctgggaggcagaggcatagagttcctagaaaacacacaggcttattattccaagcaaaaaggctaaagtgagtatctccaactgtactcaggaagtaccaatttgatgcaatttggaaatgcatctctcagcaaagcttttgttttgctggttgcttagaattggccaccaaccacatgggtctctctctaccaaacccaggagtttcccagaagcttgaagtctccgaggctgttgacctgtatcaactccccacaaaaatgaaattatagtgatacaggctgtggcacaaaaggcctcaatctcacttgaaagatcaccaagaaaatttaagattaggaataactggaccaaaatactttctttgctagagtgagagtgtatctttgtgtgtttttatagggtcttcctttcagaatacttgagtcctgcagcaggttggggacaaaggtggcttggaagacttcaagccctgctttgtctgcagcacttcgcccacccacaatccactcttcggtgcttttgcttttgtgttttaatatggtcaattgatgctttttcaatcttatgggaaacatgagtgaaaacaagtttaaacaactctttgtttttattaattcgcattatataacataggcaaatcctgtttcatcaaacgttctcttgcctgacacttagctcatttccactctgtccccaccccagtttcaatggccacatgagagctctcataagtcatcagcaagaccagctgcagcctgccactcttaattaagagagaagttgtgccttgctgagaagagaatgcagaatgtgggtcaaatctctatgactctccggctcagaatgggaacaaaatttctgacactaaagtgtgtcatgggtgcacaccctaaatagaatctgtgaatttagaataatccactgataataccacagtaattaaaaagaaactgcagcgattaggctggctgttgctaccaattttgtgtcagattgttctttaaaggtgcttttgtccttccttagttgctcttgaaagattttagaacccttggaataaactatttaaacacacacacacacacacacacacacacacgcagcaaaggtatgaataagctatgaaaagaaagagatttaaccatatcaaggacatctcagttcgaggtaatttttttgtctttttgcctagaaatctgtctccatagaagctgaaacaaaatatggggacaaaatgggaaataaaatttaggagggggaggaaatcagagtaattcatagtaatctcactggagaccagatttgatgaagagagcttcatcaaaaagttttgtaaaaagaaaagaatagatggatgatctttgcatattgaagaacaccaggaactaatctaaatccaagtttcaagaactggagttctatggctcagctttctcttgtcaccaaaggaaaagttaagagatagttgggtgacttttggcaagcaaaggccttaaagacttctgagaatttgaatcaatctggtcatatctaatgccacaagaaattgaaaatcttatagtctatgttcctagtgtctaagcaagcactctggctttctagacattctaaaatagaatgttttcctgattacttggttttaaatgtacttcctataagaagtcagacctgagcagtcagacagaggttcccatgtggattgcaaaggccacctcccaagctgacctcttctagactccccagcacaacctgagcatttgctgttttctttaagtattcaacttcctaatgaaccaagtcaatggattttaaaggacaattttaaacaaagattaaaggagcgaggcccatggcttacctttgctctctgatacatggcccgtcctataatttgtgtgctgtcaaacatatcctgtccaggtcccttagcaatgcacatgctaggctggaacaaaataagatatgatgcattcttggccaagtaagaaattattttaaggaataaagaattataactgaatctaagcaaatagatttttaaaaccacattcttgcatttcttttcaggtagtctctcaaagtacaaactataaaaacaaaatcatacctggaattagaacagtgaatgtctttagaaatgatctattctggagcctttcttttaaaaataaggaaattgaggctcaggttaaaagatgtgttgctgattatgcaggtatctaatatctgagctaagacttgaagccaggtctttctattgactgcacatctttctacttgcttgttcttgcctctgattcttactcatgatcaccttaaattgaaactcgattaaaattatattggaacaactagctggacttctggggaaaaaaatcaataaacaaatctggctctatttcctacttcttatgtcagaaaaaattgagattgatcaagcacttaaatattataagtggaatcaaaaaattactaaaagaaaatatggataaacatattttgtagtatgagggtgtgggcagaccctcctgaaagttatctagaacaagcttagttaaactggacaggtaaaacatcttaaatttccatagggggcaaaagacataaataagacagaaagacaactgataaactttaggaaaactttgtactattttgacaaaactaagactttaatatattaggagctttaaaaagtcgataagaaaaaaatctttattaatactggtttaaccccgttgggtggagttgactgggatggaataaacatcccagaaatagtatacaaaaaaagcattatcacaggtgaaatgttctacaaacacaaagaataagaacccaaaaagtagcatctactgctcatgtcaaagttgaaaacaaagctaaatgaacattgtgggagttaaataaatgatggtatagcctaacttgctgtctttaaaacatatcacacagatctggatatactcattgaaaagtttctaagacaaattaagtggaaaactcaagtcctggatacaaaactcaaaatccataaataagtcatataatgttttttataaatgcataggtaaatacataggaggaggtatgagaatagtaacttctgggaagagcaaagtatagaggaaagggaggcgaagagggactttcactttttactattctctgtacttccacattatttgaatttttacagcaatttttttgcttgtaatttttaagaaaggagaagcaatttaggtcttatattaaaaaccctataaactttataatccatgagaaatgtctcaggcaggcaatttttactacaaacttgtgactttcgaaatgccaaagcaaaatgtttcagattgaacaagtttggggaagggtagagttaatctctgacagttactgaattgtctcaccattcaaaaaacttaacagtcactcaaatggaaaaatataacttcactcagttaaaatttactgggtttggacaggtgcttttgagaagagcagatgctagggagaactaggccagtgtatactagaagacaaggtatttgtaaattaatgataaatattcaaacataaaatgtatttgagatgcaaaaacaaagatttcatgtgccataattacctaccccaccaatgggacaagtgctattggcgttatcacaggactctcctgtgttgatgcaacgtggtccaagaatgttgggggacacatctcctaggtttgatgaagaaaaggctgctacaaatggcccctgccaaaagaaatgccaagttgccttttattctttcctatttcctgtaatgaatgccattagaaatacaaacattaaatccactctggcaaactattcaaaatcatttgcaggcaataaaaagaggatataaaatattctgtaggttgcctgttcactctgatgatagttccttttgctgtgcagaagctctttagtttaattagatcccatttgccaatgttggcttttgttgctattgcttttggtgttttagtcatgaagtctttaccaatccctatgtcctaaatggtatttgcctagattttcttctagggtttttatggttttgggtcttacgtttaagtctttaatccatcttgagttaatttttgtataaggtgtaaggaaggggtccagtttcggttttctgcatatggctagccagtttccccaataccatttattaaataggggatcctttgttgctattgcttttggtgttttagtcatggagtctctacccatccctatgtcctaaatggtatttgcctaggttttcttctagggtgtttatggttttaggtcttacatttaagtctttaatccatcttgagttaatttttgtataaggtgtaaggaaggggtccagtttcagttttctgcatatggctagccagttttcccaacaccatttattaaacaggggatcctttccctattgcttgtttttctcaggtttgtcgaagatcagatggttgtagatctgtggtgttatttctgaggcctctgttctgttccaatggtctatatgtctgttttggtaccagtaccatgctgttttggttactgtacccttgtagtatagtttgaagttagttcaaccattggggaaaacagtgcgatgattcctcaaggatctagaaccagaaataccatctaacccagcaatcccattactgggtatatacccaaaggattataaatcattctactataaagacacatgtacacgtatgtttattgcagcattattcacaatagcaaagacctggaaccaactcaaatgcccatcaatgatagactggataaagaaaatgtggcacatatacaccatggaatactatgcagccataaaaaaggatgagttcatatcctttgcagggacatggacgaagctggaaaccatcattctcagcaaactaacacaagaacagaaaaccaaacaccacatgttctcataagtgggagttgaacaatgagaacacatggacacagggaggggaacatcacacactggggcctgtcagggggtggggggctggggagggatagcattaggagaaatatctaaggtagatgatgggttgataggtgcagcaaaccaccatagcacgtgtatacctgtgttacaaacctgcatgttctgcacatgtatccaaaaacttaaagtataataataaaaaaaaatccagaaaaaaatattctgagaaaactttttattcctgtaaaggctcacattacagtcggtatacatattattactgaaaatattccaattatcactgattcaagtgggagagtttcaaattatgcctcaaacagaaatattttaaccagaaacactgtgtgcaacaacaaattataaaatgctgaccagtcaatctagtctattgtgttttatctggagctcagagatccctttgccctttaaaaataaatatgctcttggcttaaacagaaaaaagcaaatacagactttcctgttgcacaatgaaactaaatataccatccacaatctggacttgcccttgatgtatattttctctctcttcaacataattagagccatgcaagtcctctgcctcaacccaaccactctaccattctaccttaaatggctctaattttcttagggaaagagataactaagtattggagatataaatcttttttgatactaaagagataatttatttcatagtgcctagcactcaggcagtgatcataaatagaaaactctcttcttttccctaaaatgcaggctaaagtgagaaaatagtaagagtgagttttgccaacaaaggagcttgctttggtttggatgtggtttattcctgccaaaactcatgttgaaatttgatctccattgtggcattgctgagagctgtagcctagcaggaagagactgatccctcctgaatagaataatgccctcccacaggatgagtggcttctcactctctagggaatggattgtagtagttcttgcaagagcaggattgttaaaaaagagcctggcttcttcagtttttctctcttgcttcctctttcacatgtgatctctttgcacatcctagttcctcttgttttctttctttttttttttttttttgagacggagtctcgcactgtcccccaggctggagtgcaatggcacgatcttggctcactacaacctctgcctcctggggtcaagcaattctcctgcctcagcctcccaagtagctgggactataggcacacaccaccatgcacgattaatgttttgtatttttagcagtgacggggtttcaccatgttggccaggctggtctcgaactcctgacctcgtgattcacccacctcggcctcccaaagtgctgggattacaggtgtgagccactgcattcggcctcctcttctgttttctatcatgaatatttatgtgcaatattctgagaaaatttttattttattggtaatagcatgaggccctcaccagatggagttgttcagtcttgaacttttcaaccaacagaatcatgagccaaaataaacctcttttctttataaattacccagtctcagttattctgctaacacaaaacaaactaagacagagctaaatgatcaggctgaatgttaatggaagctaatatctttataagggaatattaattgtaggtaagggcctgggactcttatcccattatatagtcttccaaatttgggcctggagcagtggctcatgcctgtaatcataacattttgggaggccgaggtgggcagatgacttgaggttaggagttcaagaccagcctgaccaacatggcgaaaccctgtctctactaaaaatacaaaaattagctgggcgtgggggtgtgcacctgtaatttcacctactcaggagactgaggcacaagagttgctgaacctgggaggcagaggtttcaatgagctgagatcgtgccactgcactccagcttgggtgatagagtgaaactctgtctcaaaaaataaaaataaaaataaaaatggtgcttaatccttgtatagctctaaaaacaaaagtaaatatcaacagtttgtcatattttcagcttaatcaaaaactactgttataaaaatcttgaactttgcccttccttattcaactaataactttatgaagcaatgaatacaaggactatgtaacacaaaaagcaaatggttagtactcattttttatttttctttccacattagggaggatggtaaatgctgtctattcgagcataccaatatgtgagattgatgatgacactttattctggagatttgaatcacctcttctgaatgcagcatgaatgatgacactcagtgaatcaagatgaagctttcaatgatataaattctcacctgtccaggtagatatcctttgttcttctcttgctcaagcaggtaagatgcatagcccacattgtcactgtttacaagatggttactgttgttcatgctgaccgggtggatggcaaaccagctgtaaaagagcaggaagctctaaattaatcaggagaaccagagaactggggccaagaactatgactgggagcttaagttttctccagcaggaaaaaatatttttaaataatagacattctacatctacattctttcattgttcatgggcttaaaaatacaatgcaaaaaatgtactcaagaagtctgatcattttcttaaattaaaaatacaaaactccattttcatgactatttcatcattggcatcatcattggactggtcagttaccagatgacatacctaaagaactgtatatacatggactttgtccttcaagataggcacacaggtagtaattattcaaatttatccaatccgacatttactaagggttacctgtatgctaagcactgaataaactgtggtttactttcagaatctcaccaaagacacagatgtgaacaaatggctttaacacagtgtgacaaacgttgcgaagaaacaggcataaagtgttcagggaccacagatgactaacaattaattcttgtgggcattacagggagaggaaacagcagggtaaatgcacagaggtgtaaaagaggatgttaggcataattcagtatatccttatgcctagtaataccttgtttaagtgtaaagttatacagtttacaaactaatttcacatctgttaccttatttgaacttcacacaactctgagagacaggctgttttacctctactctgcataggtgacccagagaagcaaaataatggtccactgttcacagaggcccaggactcaagtctgggtcttgtgacaccgtgtccagtggcctttgtaggctcaaaccctcacacaggtgaaaaggatatttacagagtggaaggcagtaaagcagattaactggaacgctcaagaaaagagagatgctagttcataaactgtcaggttaacttagaatttaaaaaaaaaattgttgattcaattctttgttgaaaaatctttaaacgtttttgcttacattcctacctaagcaatgtaatgcacaaaactaagcatctatttaatggctagaaagggtttaggacttcaagatcatctttcaagcatcagttcttattgcctatcagaagcagatgtagggcagaggtggcctgctcaaagcccattggctctacgcaggcaacacaaatgagtcatgctagttggtacaatagggactggtgtggactgtagaaaacttgcagtgtctaaagttcacagcctctactcagctccagccaagtgttgccttatgggagtataaaccagtgcttccagctcttctcctttattcaaaaggggccacaaatccatgttttcatatgtatttatcaactttaaaattcttcaggaagtaaatggcatggaaacaaaggacgggaactgctatacattaagagacttaaaacttgtagccaacaaatgtagtttgtgatctgattcaaacaaaacaactatttgaaacaaacaaacaaaaaaagactttttgatataatcagggaagaccgaacacagattgggtgtcagatcatattaagaaattaattttaattttgttggttgtaataaatgattggggttacatattttttaaagtctttatctgatgaagataaatactgaaatatttatgagtgaattgtatctaaagacacatggacacgtatgttcgttgcagcactattcacaatagcaagacatgaaatcaacctaaatgcccgtcagtgatagactagataaaggaaatgtggtacatatacaccgtggaatactatgcagccataaaaagaacattatgaatatgtcctttgccggaacatagatggagctggaggccattactcttagcaaacaaacacaggaacagaaaaccaaataccacatgttctcacttataagtgggaactgaatgatgagaacacatggaccaacagatgctggggcttattggagagtgaagggtggaaggagggagaagattaggaaaaataactaatgggtactaggcttaatacctgggcgatgaaataatctgtacaatgaagccccatgacacacatttacctatgtaaccaacccgcaaatgtactcctgaacttaaaataaaagttaagtttttaaaaaagaagtatataatgtcctggtatttgctttcaaatactctagccaaaaaaaaaaaaaaaaaaaaagtgaggggaaggataaaacagaatgacagagtcttgctaattattgaatctgggcaataagttatatggagattcattacattaatcactgtaggcattcgaaaatttctatgtagtttcttttttcatgttggcatccattttgaatttttcaaaacacaatgtcaagccaaatcaccaatgagtgagctgaattcagtccctgacatggttatttgcccctgtgctaaggaataaacatttattgggctgaagatattctaagagtcatcccctcgcagttatttgcaaggtgtttacatttaggaatattcttctattaggtttgtgtgtgtggttttgtctctttctcttagaactcaagtatcaggaaattctaatcaactagtgttttccagttacatggattttgcttttttggagtttctttagtttggaagaaaatgtggtggtagcattttggcttcccaaccaaaacatttccatctgataccatcacactgaggtcagccagcttcagccaacactgaatatttccattacaatcaaagaaaaaccatagaactattctgctgacattatttagctcttattagacaaaggactttatgtacaagatctcattttattctcacagggaaccctttgagtcaagtactatcattatcttcattctgcaactaagaaaactaagtcccagagtggtaacgttacctgacctaggtcacacaatggtaagtcaagaagcagagcaatgaattcaggttgtgtgtgtgtgtgtgtgtgtgtgtgtgtgtgtgtatagatagatagatgatagatagatagatagatggatggatagatagatagatagatagatagatagatagatacagatacagatagagatatatgctcttatccactgtggaatcctggttctgtcccttctcttcattcacttgctcattcactacacatttggttaactttgactctgtgccagccaccaggaacataaagataaatgaggtatcatcttggccttgagacatgcttcacaaaagaagtgacacttgagctaggtcttaaaagatgaggaagagctacgcaaaggaatcactagataacgagtactcctagcagaggaaataacatctgcaaaggcatggagatatgaaggagggccctgtgttcagagaatggatagtcagggcggccagagcagaatggatatggacaaggaaagatggcagctgtatcattcattcaatcagagtgaatttattgggaatcatgttgattggcattgtgtgaaggatcgtaaagaggaatcagatgcatttcctaccatcaaggaccttgcacaattggccacaatggtaactatggagaaagcatgtactaagaatttcactctactagttagatatagacttgatttcttcttcttttgaaaaagtgtctcactctgttgcccaggctggagtgcagtggtgcaatcatggctcacttcagccttgacctcctagactcaagtggtcctcctacttcagccgcccaagtagctggcactacagatgtgcaccaccatgccaagttaattctttttattttttgtagagatggggtctcactatgttgcccaggctgatctccaactccagagctcaagcgatcctcctgcctcaccttcctaaagtactgcttttacaggcatgagccaccacacctggcttgatttcttctttattccatttattttaagcctcagaaaataaactgaactttttctctagaaaattaaaataaaataagtgttcagaaaaaagttatttaaattgaaggaaaggaagatgtcatatttttcctccattgtcctttgaaatgtgcactattaaaatagcaaacttgtcacagcaaccaaagtactatagttatggatgaatatttataaagatatgcagaaaggtgatcattttaattttaaaacacagtacttatattttattttatctggccaaaaaatatttttccaagcaaagttcaaaagaaaggaagaaagctttagtttcagaagttaagaattcagacataaaaggatgaatacatctctaataataagcatttttaaataatgcttatgtcacagctaaatgtaaaataggaagcaaggtgctacttgaatcagcatgatgtaattaaaaatacagcagaaagtcaggagattggggaccttatcctagtttgtagcaaaattagtcaaaatttctggactaaaatttaaaaattattgagactgaaaaataatagatttcaagtattatagaatcagtaaacaacatattaatataaaacactacaatttttttttccttctgtgtaaaggaggcatttggagaaaaagatctctagtgattcagatattgcatgtgccctactctgaaacaaaggtaaaagcagattccatgcactcagacctgggcctccatgtccagtgtgcaagctgtgccctgtacaaagaacactggcaaagggggtaagtaggtggttaaatccagcctctgtgcagctcactgagcctggcacttcagccagcccagaaaagaggatgcgtttgtgtaacttagacaaaggttctacgtgctagcatggccctccccgacctaaacgcccacaaatagggaaatagaatactgtgtatccattcaaaggtacgttcatgaagattcatagcaacatgggagctctttaggaaataaaatataggaggctgtaatgggttgaatagtgtcactcaaaaatgcatgctcatctggaacctcagaatgtgacttacttgcaaatatgggttttatagatgtaatcaaggtaaagattaagtgatattatactgaccgcatgtaggctctaaatccaatgactagcatcgttacaagaggaaaggaacagagagaaacccagagacatagagaacaaggtgatatgaagatgggggcacagattggagggatgtgtctacaagccaatgaagccaaggattgatggcaaccactagaagctaaaagacatgcatggaacagattccccccttagagcctccagaaggaaccaaccctgctaatgccttgaatttggacttctggcctcctgacctgtgagagaataaatttctgttgttttaagccacctagtctttgataatgtgtggcttccctaggaaactaatacagaggctaatattgtgttacagtagctgaaaataccagctctggggtcagacatgagttacttaatttatttgaacctcagtgttcatacctgtaacataatgataatagtagtacctgcatttgacaattaaaataactaatacatgtgaggtgcttagcacaaagactggctgataccaagaatggaataaatgttcactacaagaatattggtgatgctatactgatactactgctgctgcagctgcagatgatgataatgatgataaaggaaagagatacaaagctctgagcataaataaatatatatatatacaaatatatatatgattcgtaagattaatacaatgttaaatatatgggggcggtgttcaacattcgcaacacatgtatattcaacccacatggtatgggcatgaaatgattcagtgaggatagcctgccctcttgtgacagagacgtgagtgctcacaaaatgcccatgtgctcttctatttcccagtctcatttgcaaggtggggcgtgtgaatacctctgactaataacatgtgtgcagaaggactacccaatcttcactagactttccatgagtggaaaataagtcttcaatgtgttaagccactggaatttcacattctatcttgtgtggcacttgccattaattaccttcacaccctcgttttcactccctcacaatcatcctcaccccaacccactgcaaactgtttggagaagaagaggaaagggtgtttcattgtcttatactggaaggattattgggcccagacttttacctaaaaggcaagctaaattttaaaccagcagaagaaaagaatacacaccggactgctcagattttaaaaagataatgagctctagccagaagagccctcctaaagttacaggcacacctgggacaagcatcctgcagaatatttctaccaactccaccccagagaagtgatgtacgttctcaaggaatccttttgttatcttcaaaaatcctgaatgaaaaagaccttctaaataacaatattggagaaatatctcattagggtaaattccattaagttacagcagtcaaaatccttgcaccacgcctttagtcccagcactttgggaggccaaggcaggagtttgaaaccagcctggccaacatggcaaaaccccatctctactaaaaatataaaaattagccgggaatgacagcgcacagctgtaatcccagctactggggaggctgaggcaggagaatcacttgaacccccaggaggcagaggttgcagtgagctgagatcacgccactgtactccaggctgggcgacagggcgagactctgtcaaacaataaaaattaaaaaattaaaaaatccttgcacattacatggtaagtgcaacaagaaacaggaaatggccaatagactattgtttttttatttgagccaaaccgtgaattgaagaaattcaaaggaaaacaacagtgatttgacttttttaagcctgttacttggcaacaattgtaaagcatggtcatactaagattggcaagagtatgacaaacaacattctgctcaagtttgagtaatgggagagtaaaccaacaaaggggtgttgggcaatttataggaaaagctttaaaatataaacattctctttggctcaggaatcccattctaggaatttagcttaaggaaatcattggcaaatatgtatctgttcaagaatgcttatcataggccggatgtggtggctcacaattgtaatctcaatactttgggaggccgaggcgggcagatcacctgaggtcaggagtttgagactagcctggccaacatggtgaaaccccgtctctactaaaaaactacaaaaattagccgggtgtggtagtgcgcacctgtaatcccagctactcaggaggctgaggcaagagaatcgcttgaacccaggaggtggaggttgcagtgagccaagattgcaccactgcactccagcctgggcaacagagcaagactccatctaaaaaaaaaaaaatgtttatcacgatgtattttatgatggaaaacactgtaaacaatctaaataacaaatgattgctgattagttgagtacattatgatacatagaatggaatactacatggcaatttttaaatggtgatttaaaaaatactaactggcattgaaagatattcataaggtattgctaaattaaaaatagagttaacaaactgtaaatataataaaatcccactttttaagaaaaatattataaatgtgcttagaaaaagtctgaaagactatgtaacaaacttttaatagaagctggctctgagtgtcaggatctccacacgattttttgactttttaatttttttcttactgtggaaattttagaaaatatataaaagaaaagaagattttaaaaattacttgatacaacaccaagaatgaaccctaaggtaaactatgggtgatgatgatgtgtcaatgtaggttcatcagttataaggaatgtactactctggttggggatattgatagtgagggaggctgtgcatgtattggaagaaggtgcatataggaaatctctgtacttcctgctcaattttgctgtaaacctgaaactgcttttaaaaatatagtttattaattaaataataataaagtctattgaaaaaaaaactatgcccagcactggcacggtatcatttctgcattgttctattgttcaaagcagtcacaggaccagccaaagttcaagaactaggaaaataatctccaccttttaatggagagtggcaaggtcactttggataaaacatggaataagagcaattgttgtgttgttgcagccatttttataaactacaatctgccatttaaatatatattttaaaaatagctatcaatccaaaaaaagtaagagatgagaaaggaggaaaaagaagcactgaaaaggtgagacaaatagcacaaagtgaggagatacagaaaagttcagatataataatcacaattcctgaaaatacactaaattcatttaaaaaacaatgattgtcagagtacaaaagaaataactaaagctatatgatattcataagagacacccttaaaatgtaagaataaagaacggttcaaagaaaatgatagaaaaatatacatggcaaattctgggttagccacattaacagactatgtagactttaagacaaaaaaaacacattattagataagaagaggatcactgcaaaaacaaacagatacttgatggtctcagtacatggagataacattgttaatatttttatagtattttaaagcttctagtgcacagtgagtgaaaccaagtgagcattcacgtttacagaatgagcttttagtcatgtgtatttcttattatatgttccacatagaaaaatgaacagaagcaaatgcacctgaatattaaccatgattgattcgaggtagtataattttaatttaatttttccttcctttctactttctttatttttcaagttttctatggtaagcacacactatttttatactgaaaaaaaacttagaaaaaaataataatctcccagatttttttcaggttaagtaagaactttccagaaatctaacaatcaagttgtccaatatctccagccaactatttttttatggctttggtttctaaacttgggacaatttaaactacactaggctgatcaatctttgttatcagtcaacagtcaccatcttggtcatctaaaagcccttttaggcaccttcacctacggggcaggggagaggggtgaacctgacccaggatgaaagctcacttcacaaccatgaccaagctccactgaagaagaatacaggcaaacagaaagtaaagttagagcaggaagacagcatcaagcttcacaacatggagcggaacaagaaaaagaggttcagtgaaagatatagaaaaagaaagcaggggccaagcacagtggctcaggcctgtgatcccaacactctgaaaggtcaaggtgggaggatcccttgaggccaggagttcaacaccagtctaagcaacatagcaagaccctgtctctatttattttttaaataaaagcaataaataaaataaacagaaaggaaggctttataaatcagaattcatgctaatgatagagaaggcatttaggaagacaaagacaagatgagatgaaaaaaagagaacaagaatggtttggtagagggcagtcactaaggtttcagcatttgcaatttgagtggggttaagtggacggaggggagagtatagagtcagaatacagaaaaccatagagaataaacagtcagacattacaattcaagaaaaataattcaattattctgtgtcaattaaaaacaaaacagttttatgtaaaaaaagtttttaaataaagaagtcatagtcatagatgatagagaagatttatatatatactgcaactgagttctgtaagtcaacaccatttgaataaatgagtgtaatagcacaaataggatttttttaactttttacacaaatgattcaaatagcttacacaaatcactgcccctgtcatcttaaaaatatgcctttaaagggctcccttacaagaccactgactataagaataaaagggtttgcaatacataaatagaaggcagtggagaggagaggagaagagaagagaggggaggaagaagaggaggaggaggagaatcgggatgaggagcaaggaggaggaagaagaaaagaagaggaaggagaaggagaaggaaggagaagaggagtccatgtgactgctgcaaattcaaggaagaaaacttggtggaagaaaagaggaaggcaaagagaagaaaagcaagacaaagccttttcagttgcagcatccttgaagaaataagtcggcctcctcacctgtctcagagctgccttcgtaagtgtagctatgtgagtagtagctcttccactgaccacaactaccactcagattatctgcacttgtgactttctttttgatgtagacatttgaaacctgttttgctttctcccttcatgttttcttcacacacatagtgtcttattgcatccgagactctcaaggttctgtttattttcctctattggatgacagactctttgaagtaccttacagagtctcccaaagtgaattttgtaaatgttacacagcttatattttaattcacaattcagaacatccacaacatgttctccatgtctggagaaaaaaaaacattgaatgctttcatgtaaggggaaaaaggcacaaagatagcaatatttttctgacatagaattttctaacagatttttctgacatagagcaactagagcaaatggtggcttcacaattgtagagggcttaatggttcatggaatagtttcaggaacataattttatttcattcctcaagtctacactcttcccaatccttcgacagccccaactcccaacccaagtttgagacactttaatgagttttcattcctcttggtatagaaaaacaaattctttgtcatgccatctaatctctatttcttactttgtcttgcaacaccctgccctgttgacctctgcactccagccacactcaccttttaccagttcttcaaatgcttccccatttgtgttaaatgttcttttccaatccccccattttgccagttaattcctactccagtttccagctcccattgctgtcacttcctcagggaaacctttcccaatctctctgacaaggtcaaattcctttaagaaagttctacacacctgcctttcttagcactgagcccaattataattttacatgtattgtatgcctatctgtatgccttctgtctccctcagtagacagaagtcctataagggcagcaactccatctatatttgttcatcagtgtatcccataataatctctgtgtggagagaagatatgatagccacatttgaaaatacggcaactgagtctcagagagtttaatggattcattccagtagcacaaacatgggtactagattccttatttcaaggccagggaatacatcattccaaggaagtattgcgtggctcatagtaggtccctagtgcagacttgctgaatgaaaaactgaaaacaaaaatgagagtaagaaggaatgaattatgaactcaaatatggttttcattgtgaagaagatagtcttggctgtgatgctgggcaggtcacatcacctttctaggcccttgttcctctgctgaaggttaaactaggtcatctccatgctctgtgattctgagttgctgtgcttccaaactcctcacaccttgggattctgtctaacagcaggcatctacatatggtgggtgagttacttagcagcccacatttgactttatattttggatcatttttaacgtattcaaagagcaattacactatgcaacaagaggcaattgcaggagcaattacatcaaagataacatacggcagctcagaaacaatggaaagttattgcaggatgttaagcacaacagatggaaaagctttgctataaccttgacagttgaccgaaagacttccagatacatgatacaattgcatgtatggaagcaaagaacatctggccaaaataatagtatttttgaattttctgttccagttattaaatgattcaaaaactggccaggtgcagtagctcacacctgtaatccaagcactttggaaggccgaggtggaggatcacttgagaccaggagtttgagatcagtctgggcaacaagcaagaccccatttctacaaaaaattttaaaaaatagccaggtgtggtggtgagcacctgtagtcccagttactaaggaggctgaggcaggaggatcacttgagcctaggaatttgaggcagcagtgagctatgatcacgccattgctctccagcctaggcagcagagcaaaagcttgtctcaggaaaaaaaaaaaaaaaaaggttcaaaaactactaaaagggaattgtaaatggtcttggtccttcagccaagagttaaatagaaactataagggcgactctatctccttgtcccaacaaatttgggatactcagtgtaactagcagagatgtatgctgttatcctgcccttcttgtaattgaatgccccactaaagtgctctagaatctggacctgttttacctttccagtccaccttttaccaatgccctgacctcacccacactctggccttatggctctgtatttttcatgactccgtgagaaatcccatgactccttgaaggtccaactcaaatgtcattttctcttggaagccttccacagtgctctcaggaaaaactcagggctacctcctccaaactcccacagcattatttatgcccatgggatagcactgctggtcatctgattcatgttatggttacttgtctatatatttgtctctgtctcttgccccaatcaccccaccagcttgtgagacccttaaagatagaaaacttgccttattcatcataacataccccactcacacagttacatgcctgacatttagaaagcgtgctgagttaaatgctaaggggaaactaatcaagagataagttgattgtagtagaagaataagtccattatgtcagcccatatagcaaagtttattagggagtttttagtgacttcacttttaacacaaaagaggaactcaaatgctaagaatttcaagcattctaatatgctggtaatggaattattcagaagaggtagaatatgttttctattcctttttagctaaaatgattaagcttttttctatgtcaggcacagaactagagttttgtatgcattatctcatttaatcctcagacaaccctatggggtattactattcccattttcaaataggatagttaaggtctaagtgaattaagttactttctccaggccacagggttagtaagtggcagagggctgggacttgaagccaagtcaaccttacctcaagacctgaactttttattaccatgttgttctccacctagttttagggccaactgtggtgtgtgaactgtgaatcatagtttttaatgtttttcttcaccactttgtcaattttactgcaagttttattcacatagcatcttttacttagatattttataattctacttggcagaccctttgtcatctttctaatcattattatcaacattttaaatacttactttatcctatggtatgcacaaaaatgcttagggatgagaaacaggaagacagggtagtcacagaacttgtctaaagtcacattgctaataaggacaagagcccagagtgaacccaagccatttgactgtagcacccagcactatctggtacttccctagggcatgtctgcatcatttgcaagtccataggtcaaagagtctggaaccatgttacccacccagtcaattcctgagtcaggccagttgcagtaaccaaaatcacatatgaatgcaaattccttattttcaagaaaacaaaatccatgtgttttcctaaatgctgtcactcccagataattgtgctaaaagctggccccacctgtaattttccctcacttgcttcctttaggtgttctcagttctattttatccctacttgccattgtcctgcattggacttaatccttttagggaaacacaggtaaataatctcaaagccataatcactttcctggttggttagattgttttttcattttactaggagataactgtatatcatcatggaagttccacatgtgagatcttgataacataataagtgttaatgtttactgaatttttgtatcatatgcgagatgctgtgccaagctcttcaccaagatctctcatttatcttccctgtattaaatctgttttgtaagtgcagaactaagccctgagagactgagaaccctgtacaaggcccttggctggaccccagttgtgtctgacttcagaacctggactcttaaccacacaacttattctcagtgtgtgctggtactattctagtctcttttcccttctctttaattaagaaaagctacccgacagaattatttttaaaaaggaaatacagtacctgataaggcccaagtcatctccattcaaatctaccattttcaaaactatcatttccttgtctgtatttgaagaatacctagtcagtaaaacagaaaagcacagtcagttctgtgttagagcctaaccctcatgtaagatgaacagtagcagctgacacaaaaacaaaaatgcctctcagtaagtgagatgtcttgacaagcagtagttctgtgaactgtatccagtacctcatttatcagctaaggaaaggctatgcaattgcgatcaaagtttgggggactaggtcaagcgactggagctgaaatacacatatttttatataacatacaatattatataacatatatgtatttcttacaaaagggatttatttgtctttgaaatttctactcatatcaatttttaatgaaatctctttaaaagagcagggaatttgcaaaatcaaaagcattcaagacctgcaacttaagtgttcttttatgtcttctcaagggaaatcagattacattttctaaaaatcatctcctttgaaagctattgaaaaatatgcagaaaaatgttaaatgtcaagtggtcaagtggaaactgtggtattattttacagtgttacagtaaccaagcacttctcttctgttacaaacctggttcatcacttaaaaaaagacaaaaaggcaaaataatcctctcccttagtttttccattcaaatatgtgggtttatttcttactcttctgtccatattctttatccttttattttctctgtcttgccacactcttgtggactaagatgatttattctggataacacataataaaagagctattcattaatttaataaatatgcattgagcacatttttatcttcattttactgatgaagaagctgagagacaataaattaagataagtaaatcactaaaggtcacattgctagaaagcaataaaactaagctgagaccacagttgttcctgatttcaaagcccagagtccttcaaacatccacactcgctcccataatcaacaaagtggaaagatacattaataaattggtgtttgtttctacattcactttttgtttctgcttgttttagattatacagatgtttttaagatatcatagctgtaatactctcttgggacctcaccatattcatcaagtaacagccctgtacttagattttgttgctgttccctaaagggaatgaaacgatttcattttgacgattcctcctcaccttgctctctctgactgcggattttgaaggtaagaatacggacttctgttgatctgcacaccatccacatttcctttattgatgaagattttgcctggtttcatatttgtgtgtgctatgtcaatgctctgaaggttaaaaaagagggggatgttataagcttagaaatcctggtggggacaataacttagtcaatataaacagaagagccctgtgaacaatttcctttgtctctaatgggtccacattacgggataaaagctagagaaccacatcgctgttgacaatctggaggtaaacagaaatggctttcaaggttgagataagggaaatgccgtgttatacggaagcacagtactgattaatgcctgagctcacaaaaagtctcaactcctgctctctcaggactgctaaatgaggttcagtttgtcacttcagatagccaaaatgggagacttgactcctacaacactaatacaagttttgctaacatgcaactgtttccacctccctacccttgccattctaccaccaaggcagagttgttcaaacttttttgacagtgaactacagtgagagatacatttttcatcataacttaatacacatcaacatatgcatcccaaaacaaaagtccacaaagcaaactatatcctgactgtgtgtcatacactatatcttacaatctattttttagcattttttatgtaatgttttttgcaatccatgaaattgatttcataagcctttaatacattgcaagcctcagtttgcaaaacatcaatgtaaagcaatttctgcctatgccagctggatctctgaattttgggggtgacattgtaagaaaaaatagagaataagcctggaatacaataaaatgaagcaaaacattagcaaggatcctatgcaacaaaataataagctgaaagacagaaaagagaggagtataagctactgaaaccagaaacaggagaggagtttaagggtatttgtcaggagcaccacggaggtctgtatctatactagagaacttgaaaaattgggatgtgtgtttataagttggattctctttgtactttgggaaatattttaaaattttagaattatttgtaattacttttggctccttcatgggtttctctttgtgtgactttgtgcaaagaacaggccatgtagtgccctctataaagaaccccaaaccaaaatgttttctgtctgtttaaataactacattgggcttagtcccatagaagccttcttttccaatcatccatgcctcatccctaacagcccatagctcagaacaagaagctaagatagagtcagggaggagaaagaattgtacatgctaatactatgctcagacccaaatcctatagggattctttatatcacatccaatcactcctaaaatacctgtaagcaatggtaaagaacagctgcctctggggctctttgcctaccttcaagataccagtgaccatgtgctgaaaagtttgattgctaaatccttcactggcaattacaaacacggtatactggaaatatcctgcaggacctgaatgagtgtgagtgccactcaggatgacattatctcttctgtacagggagccatatttactctgcagtctgttcaggaccttcaagaaaaaaagtaattgaactaagaagagggataacataggagctcaacatgagaaaaggctttgatgagttcaatcactgatccataccaataacatctgtattagtccattctcatgctgctaataaagacatacctaagactgagtaatttataatggaaagaggtttaattgactcacagttcagcatgactggggaggcctcaggaaacttataatcatggcagaaggggaagcaaatatgtcctccttcacatgatggcaggagggagaagtgcagagtgaaaggggggaaagccccttataaaaccatcagatcttgtgagaactcactatcatgagaacagcagcatgggggtacccaccctcatgattcaattacctcccatggggtccctcccacgacacatggggattatggtaactaaaactcaagatgagatttgggcggagacacagacaaactatattaacacctctttcaaatggcccctcactgtatgtttgaggatattatcatagtaataacaacaaaataataataacaatacctaacattttatagattcttactataagcaaacacaatgctaggtatgttatatatattatgtatttaaaaatctttattacaatttcaagagctacacaggtattgttaagcccatttttagctgagaacattgaattatacaaaagttaaataatttgcctgttgatctaataagtagcagagccagactccagaccctcgtctaactagagaaccagtactcttattcattcatcattcaacaggtgctctaagcaaaagaatatatgaggttcctgtcttgaagatattttttttctaatgaaagacaaagacagtaagcaagcaaataaatattaaatattatatcatagagtgatagatgctatgaagaaaaacattgttgcataaggaaaaagaaagtagtgggtgttagtgaggaaagatcttctaatgaggggctctcttttagcagaggctgagatgaagaaagcaagtcggctgtgcaatatctgggggaaaagcaactcaggcatagtgagcagaaactgcaaaggttttaagctactctagtacctcatttcccaaatgaagaattcagtgtgccttgaaacgaactcttagacttgttggtctagaggatgccatccactgtgatgcaaggacaccctaataatcctgtggagaagcctaagtggataggaagcatcctgtcagcactaacttgctagccatctgagtgagcaaccttagaagtaatttcttccaccttggtcaagccatcagacaactgcggccctagccagcatctgagtgccacatcatgacacagaagtgattacatatgacttgttctaaaacaagtcagaatcgtctaaccaagccactctgggaatcctgacacacagaagccttgaacaacatttattattgttgttttaagccactaaatttttaggcgatttgttgtacagcaatagacaactaatacaaagagactcagtaaatgtttagtgaatgagttgatcaatgaacatccaaatgcatgactaatgtcttcatatggtgcatacacatcaagaaaacaccagacagaatactggtgatgttgctgagtatttgttgctgattatgctttaataagctgcaatctaaagtttggtatcattgtgtcttttttgtgaaagataattaaaaaatgacccagcagtatgtaacacaaaggataaatgcttgaagggatgggtaccccattttccatgatgtaactattaggcattgcatgcctgtatcaaaacatctcatgtaccccataactatatgtaccatgtacacacaaacattaatcaaagaaaaaaaaatccagcaaaagtgtcaaacccaaagcaattgttagcaatgtttaccttgagtatggcatagacactctgataagctgtctctctggaacacacaataaaattaaaagccctcatttgtattgttcaccaatttctgtgatgtaaaaactcctcatcatgatcaatttcaagctaccaaaagcttaacagccagctcacaatgtttctgaatatttacaaattggttcttatgagcttgtgcaagctagttccagctcactgctggtaagtggggagtagcagcttctatgctatgtacttgatatacatgaagataatcattcaacctcttctattgcaggtgaagatctacaccattctcattccagtcataaccaccttgcctcattaacctctccttgtcccaaagactgattgtttggttaccatgtccacataagcaattctatgatgcaagacaaatacagaatggaagtataatataacaagactaacatccttctgtattccttctctttggtcctaactccagccccaatcccccaccactctcgcatattattccataatgtaactaccacactcatgaagaagaaatgtataaagagaagagaaaatgatcaatgaagggacatcatgaaagctgaactaaagtcagaagctgatgttcttaacaatttgcagctaagacaggaaggtagtagagaaaaagagccacgagtcaactttaaagctccctaaccccatcctatttattcctaaagaactgtgacattagggctttagaattaaatgcatttcttcatgtctactcaagaatcaagcccttaagaagacagaaattatgaatcttgaattttaaaacaagaaagactacaaacggtacacaggaattttattttaaactacagtctctgatatgaagccagacatatgggacttctagcggggagaaaaaagaaatacataaaacctagtcatataacaatgccaggaagataaccattaaaaataacgtgtttcccagttcatgaaaggagggtattttaacacaggacaaagcagctacatttatgtctaccgctcacttctgtcttcagtttctattccatttcgtctcactgacactcttgggagcatgacacagaaaaacctagaaagtccttctgtttttctgtcatgcctcactgcacagagatcttccataatcttcattctgtgctggaaatttcacctatcttaaagctgacactgagaacctacatagaagcaggtgttataaataatattaatgacacttatttagctacatttatttttcacaccttcctttgggttaatttgggaaaactaagtgggttcatttaacagccttcccactgggtctcagattgcacggagatgtaaaaataggaagagatagaaaaatggtgcccactattgacttgataacacctacaaaacaacacattaaactcctccccactctacccgccaaagtctaccttttggttcttttatttctgctaatgaccatactatttcccaattagagccatgtcatttttcagaaaagcagtatagtatagtagaaatgagcatgaattctgacaccaaaacacttaagtttgaatcccaactctgacagttcctagctgtgcaaccttggataagttacttggccctctgcaaacttggtttctcaatctgtcaaatgacataataataatacctccctcatagagtcgtttggaggaataagtacattaatccatacaaggcactgacaagagttccagactcagcatgaatattatgttaagtactggcttttatgtctattcatctccaaatctcacatttaatttttttttttttttttttttgagtcagagtctcactctgtcacctatgctggagtgcagtggagtgatcttggctcactgaaacctccacctcccaggttcaagccattctcctgccttggtctcccaagtggctgggactacaggcacctgccagcatgcaactgatttttgtatttttagtagagacagggtttcaccatgtttgccaggttggtctcgaactcctgacctcaagtgatccacctgcctcagcttcccaaagtgctgggattacagacgtgagccaccacacccggctgactcacatttaatttcctatcccaccaccacgtagtctcactgccatcacattggtttaagatctttgtgccagtctcacgtgataaagggggaaattgttaggcaaagttacaaaaaataaaaacccttccagcaactccagcttccctttcttgttccttcagccttttaacatcttgtaaaactcccctgggtgaaatccctctgtttgaaatacctagtatgatgattactgttttcttaactggaccctcaccaataaagcctcagtatcactttaaagaatctgctaatttttgtcctcacttctagttccactctattccaatccatatcaaacatctctacctgcttaatcatcctaaaacaaaatggtgtttacatcactccgccactcagaagatttctcagagtccatatcacccacagaattaaaaacaagctggcatctcaaggccctctgcaattatgataaacatatcttccagatacatctccaactacatgcctccatatgtcctaatagatctcctctgttccctcatgaaagagtctacatccctcctttgtgcctctctgtgttcattctgtttcttccatcagatttctctgccttcccatcctaaccatttaaaattctgctcactcaagtgtcatttccaccatgaaaatgttttcctaatttgcattcctgaatccctattggtgatcttaaaagaccatatgtccacaaagtctcagatattttgcccttcaagaagtaaagcttactttttcaccactgagtgtgagctggacttagtgacttgcttgatgaatagaacagggtgaaagtaacggtgtataacttctaaacctgggtcatacaatgcactgtagcttcctccttgctcattctcttgggtcactcactctgagggaatctagctgctgtgtcgtaaggataggaagagtgaggaactgaggcctttggccaacagccacatgaacaaaccatcttggaagtggaccttcaagcctgggtcaagctttcagatgactcaacctttgccatcaccttgattgccatagaacctaaaccagagccacctaaccaagacagaattcaagcttttcagagcgggatacctgaagtattatataagtattaggacagagatttagttagcatcgaaataggagattttatttggttggagaatgttaggattttttagaaaattacgttaatcgaggggctagggttggagtgttcatggttaaattatgatttttagggctctgactaggttcaatttaagtatcttgtttttgggggctggcttacctaatttaacaataaactcagagatggggggagggcagatctgcggatttaatcggaagcactcctttaaatactgcgtgaacgtacgtgtgtgtgtgaacgtacgggtgtgtgagaacgtacgtgtgcgtgaacgtacatgtgtgcgtgaatgtgtattgattattatggccttcaagcatgaatgaattagcaccttatggtttggtatgttggctcagaatattcaagataagtccagctacagtcgattccgcagggatcaggctcccgccgtggtaagtggcagcatcccgaaaacaaaaacataccaaatgcatgacagtgctcccatgactagttattagggtgatagtcactagtacattgagatataaggtttgcaaatattttctcccagtttgtaggttgcctctccaccctccaccctcctgtttcctttgctctgcacaaggtttataattctaagtaatcctgtttatctatttttgcctttattgcctctgtttttgcgtacaaactaaatcctcaaaaacctgtattatcatagttataagatttattttggtaagattccaaatagtttaaaatgcttttgtttgtttgtttgacataatggcatcagatataacatggcataatgtcataccgttactctttcacttaaaaatcgaaatgtaaacatttttaaatatggcaaaaatgtacattagaaatacattaaatggtaaataacaaactgctgttaatcccacatataatcatggcttacttttataatactttgaacattataaagtgattttctatctcttattatattttataataacatgtgggatagctggagtagatattattttctctgccttacatgtgccaaaaacgagagagggagagaagtgaagtgactttccccatattgcaaagacacaatggtgcagagctgaaactttactgattatttgaaatactttacaatttttctaaaacatagtgagatctaggttcttagtgttataaccagccctatttgaaaatttctcaggatattggttcatcctttattaaaacaaacaaacaaaagtaggatcaagttaagaaaagcagaatgttttggtaggattaggatctcaaaataattatctgaagccaataaagtgtcacattatttttcttgctttatttttaattctattatttttcctgtgtctatatggtgatataataacctgagaaagacggttctaatcacacatgtactaatcacaaccactcaacataattttaaagtaaaatttaacccggatgtaaatttaaaagttcttaaaagtattcaacttctgtgtctatacttaagactccatccctaggtgtccgttgattatgcaagtaggattaacaataattaatttatcaacctaatctttaagcagtgcaagcattattattagactttcttaaatgggcactataatatgtatcttgattgagcttacttatttcatagaagaatggtatttctaaaattcttttagagatttttgatattcaatctcaaatgtttaatatattttccaaaattatcaaataaggatgagcactagcatactctaatatttacaggaaaaatataaacaaaaacacttggatttctaggttctttaataatctcaatgccaggatgaattctctaagtctgaaaaaattgccatgacttggtactaagatcagtatcaattcaaccattatttatttaaaaaaaataacttaaataaaagttgcatttaccattttgtgcagtggttctcaaccctggttattcctctatagttttaaaaaatgctgatacctgggtccttggcccagtgattcagcataaattagtctcacatgtggctttgtcatcaggagcttaaacagttttccagtttatattaatgtgcagctgaatttgagaacaactgctttagtcttttgaaatgaggccaggtgtacatataaggccttactgtgcaaagatttaaatttgggggacattttggtcatataaagctggttaatacagatgaagtttaaaagaaatagactcttacttaccagatatactaacactttgcaggaatcaagatcattttgagagaattaaaaagaagagaaaaataaacttcctgaatcctgaatttataattacatgttctacctttctcgtactataccatcttgattgatgcttagaataaaattccaaagaatctgaaacagcatacaaaattatatttgtatgattttcatgttcaacatatttcagtgaatttcaatgattaaaaattaattatccataggtgatatatatgattattccattgccaagactgttacattaagtaaggcagctagttcccaacagatctggaaatcaatgttgcaatctgaagaaggcttttaaagtcaatattcttaggtacatatataattttgttataatctccatattattgcaattcaattctacagaagacctttcttgtcacatcaccagtccagtgacactggtagagtgtatcaaaggaaatgtgaattgtcctcttaaacttccaaaccaaataatagagtgaattgatttatatttcaaccttgagtacggaagacattaacaattatgatccatagtaaaaatcctgtttttatgcagtataatttattgagactcatttaaaattcacataacatttgattgtatggaaggtgtttacaattgtaatttttgcaacattgaaaatgccaaatgtgtttgattaatatcaacttcctgcagccacacctgtgtaatatttatgcctctaaattactatttgtggtaattagcagtttttccattgcaattaacaagcttcaatctcgaacattgtctgagatagcttaactttttacttttttcttagttgaaatgttttaattatagtttaatttgttattttagttttccttttgtcttcttggagtttaacctcaataacattttgagttggttcttatttatttgcatcaaaccactctaaaatgtaatacaaattattatcactccagctacatggaaaaactttaacaaacctgtgaatgacttaatcattttaacaattaagacatttacacacacacacatttcttctaaaaagaatggttaaaactacctatatactggaaacatattttcatataactttgcttattattatttgtatttatattgcataaattatgtcagtagctagaatgacatggatttgacaagaatagagaaaaggtggtttcatatcccagactcttaaaacacacttttcagtttaggacacaagcgctctgaagatatgtatatagtcttcatgtctggcatctaattcctatgagtttccttcaattaatactaaacacatgtatagaaattgccataaactgagctgtatgatggtaataatccccaaatgacaattcaatcatccagatctttgggttgtcctaattccattatacaaggtggatctaatggtcattagatccctagatatgagggatccctagaaaagtattttcttaatcttggataatagttttcaatgctttagtgaaaattgcttatggaactcttcgattttaatcaatctttgaaaatggctctttcaatggttgataaggtaagtcatcacacagtacttctatattgtaaaaaaaaagctaaaacagtaatcttaatatacattaggtattaaatacctcttatttccagatgtatacaatagattccttttatatcttagagttaaaaccagagaaaaaaattgtctgtctccataaaccatgcactctcttttgttagataaagaaaaaagtgtaattcatctttatcttctctgatctattatgtgacttttaattttgattttaaaaattgaacttattgatttttttcttgatacataaattatacatgttcagtgtctatagcgtacattaaaaattgtttaaaatacgtataatctcagcaaacagaaaatttatttttttatttaaaatattacctaacattttaattttcctaaatatcaaaactgtcttattagcatacactctcaaaataaattttattctatcttctttaataacataccagtttttcctttatatgtattttgaacatatatttgcttcactaaatgctattttaaaagcatggatttcatttgttagtattccataactagcaattataaagttggacatttagatttatttcagttttcaatattcacttctaaagaaaggttacaatgaatatttctgtaattaagtctaaccacacatgcaagattatttctttagaatacattttagaagtagtattagattaaggcatttggcttacagttttaaaatccctttagaaaatgttctgttattataatggtctatttttgtatgccttgtattataatttgtatcaaatatatttttatatgcatggtatatataagaaatgcaaatctaattagataaagcaacaaatatattacataattgtgagatatagtctttaaagttaatatatctgagaagtctcctttttcttttaatcttcacaaatgttttttcttttgttcactctagaagattttgatgtattggttttgaatgaccaggattatttcagaaggattaaactaataaaatattataggcaacaagagcagtgaggtgctgagaggcatgtaaaactgtgagcctatagcatttaatggaaagactgacagaagggagctaaaaatatatattttcggtaccagagcctacttttacaactaataatgctgaacacagcaaacttgaacctatttaaataattaaaaagccttaaatatgaatattgtcaatactaatgttgattttaaatagaattcaaacataattgagaatttgcttgacaaattatacaacctgcatctttactatattgaacacatttatgttgaagtattgtgattataaaaatgtttatcttgaatatataattttcttctcttgtataacatgtataatgtatgtagtaccattcatattagtatgtttcttccttgttaacaatacaaaaaaggtacgtatatgattaagtctttttctttaagagaacattcagaaagcctaaaaataaattttaagtgaaacactagcaaaactttgacctttattaaaattgtacttctgtccccacttgaacctggttctgtagtttagattctgattttatttgtcgaaagggatgcctatgtactcaatgcaagtgacataacatccttcattcaataagaatacaaatgcatgaataaatacatatctattgcaaataaaataaaaataggagagcagataattattgaggtataagttttttactaaagtacaacactctctagtcataagagcagaaatatatttaccagtatagcatgttaataatgggtatttataaatgctgccaaccatatttttaatcaacttaaaaatacatttggtagaacttaagtttagctgcataaatgagagtaatgaacttagttacagatttttggacacatttgccactttaattaaaaagattagtaatcgtaacatttaatgctgctttatattttcaaaaggattagttcaataatgattataaatttccctggcatctttgcaattatcatcatcctcaaatttatagatgagggaattttcagaagaaagttaagtactaggaatagattttgaatccagtgggtttcagttacaagactgttacaagagtatgagtttataaatagtttccaagtgccaataaatgccagtggtggagataaacagaaaaaggtgattttatcacacctgatttaatgctgtttttcttttatatttcaacagtcagtggaatcttggcagtaacaaaaagagaaacaaaatttacattgttaacagtaccgatagagtgacactctttatcacagtttgagagaaacttcaagaagtaaaaataggagatgtagtctacagacacttaagaaattcacattatgccagaaagactaagtagccattcccctagaaattgaagaaaaatagaaactgggtttgattaaatgacagtatgagtgctacatataagacattttctagcctttcagagaaggaagttaagagtacatgaaaagattattactgttcctgtttgcctttgaagattacagaggagtacagtcagcatgcagagacaatattgttgtgacttacagttttaacaatgaattctattgctagaatttccttttttaaatgttttctataagagaattcttacagttctgattattatttccagcaagaaccttagaaccttatgtttctgttaggttcttcttaatcacgtacactacgaggagatggagggaatttcgttattctattctaaaacatacccccttccaatttaaaaatggaacgtttttaaatggaaaatggaaaataataaaatggtcagtcatctaaaccatgattaatggattctctagaacttagcttcttctcttccttcctctgattaccttcctttgcgcatgtcacagctcctgatgaacatagacaatagataagacaattaaccacattaatgtttcaaaacactttattatttgtttaaaattacagtttgaagctaagttggggaaccagatgccacttttacaagggtaaataataaatggtgtgttttaattatgtatgtggcccaattatcatgagtaataagtgaagcaatatttttaaaggttaaagaagttctgtatatattagagtggagaaactttaacgttctaaaactgaataaaatctttccttaagaagaaagattttgtattcaattaaatattataattagttacaatatatgggatatctgtcggaaaaaattgagtaatctactttctcaaagttttatttaaggatatttctttccacattaggtagttcacagataatagtggttttgttttcacagtctttcttgtcaaatcaaaattcatacagcaattcatgtgaaaaaagtgattgactatccttttacaatttacttgataaaatctaagtagccaagaattcaagcctagaagactctgaccaatattatcctttatgctaagaaataatattccaaacctatttcttaggctattaactgccatttgaccctttataagctgttatgtttcaatttattcaaataacatataattgtccaataagtttgcattgcctcagtaccagatctataaaaggttaatgggctttaaaaagggaagaaatcttctgcaacaacacggatgaacctgggagactttacgtcaagtgaaataagccaggcacttaaaaacaactatgacataatctcacttatatagagagtttagataagtaaaactcatagaaacagacagttaattggtagtcatcagaagctagggcatggggaaattgcagagatgtcggtcaaaagacacacaattccagttagccaggaggagtaagttcaaaaaattgattgcacatcatggtggctacggcgaataacaatacatttatatttgaaaattgccaatagagtagattttaagtattctcaccacacacacaaaatatagtaagtaggtgaagatgttgtagaggcccaaattcgggctcatgtacctgatgctcagttgaaaccaaacactgacacaccaatgcttggggatagataaaagtttattccatttggccaaagtgagaacggggcaagatctctcagacatgtcttaacaataagacgaagcagagggggccgggtgcggtggctcacgcctgtaatcccagcactttgggagaccgaggcgggcggattacgaggtcaggagatggagaccatcccggctaacacggtgaaaccccgtctctactaaaaatacaaaaaattagccaggcatggtggcgggcgcctgtagtcccagctactagggaggctgaggcaggagaatggcgtgaacctgggaggcggaggttgcagtgagccgagatcgcgccactgcactgcagcctgggccacagagcgagactccgtctcaaaaaaaaaaaaaaaaaaaaaaaaaaatgcagagaggatatttttgcagctagacagtaagagagggggagttttagggaaccaaggggaaagtctgtgtttctttaatctctgataatatcctgagcaaccagacttctgggcctcagcagttagttgcaacatccttataggcattcattccttctgcaaatgtttttttgttaccttaaagttatcttctcctggttgacaaagaaatagtaaatcagcagtttgcaattgtattgtgagaacaagggatgttggcttttatgcaagcaagcaagggcctaattcgaatttttgttatctcaatcactaaaaatgctgaggtattgacacctcaaggggtccgattacaaggtaatgcatataatgcgtatgtttagcttgatttagccattccacaatgtatgtatactttaagacatcatgtggtacaccttaaatatatacaatttattttcagttaaaaaataaataattcaaaggaaaaaacattaattggaagactcacaaagatgagataacagggaatgataaagaagaggaaaaatgtcaatatagtttcaaataatgaaacataaaaaatggaatcaacagtggtgctttttgatatgatcttgaaagttagcaaaggaaaaaaaatacatgaacaatctagatttataaatattgatctagagacacagcagaaaatagttcagaatatgtttgaatataagagaatattgttaaatatcagtttggaaactttatttggaaaatattaaagtatactgaatagttcaatacttcataacaaaatttctctagaagaaaaatatagacagaaagcagccaaaaactagtatttgaaccttttgaagtatcattacaactaatgttttgtgtactattttgtttttggaaatgctgggcctaagaagaatcagaggagaaacatatgaagcctttttacttcttttttttttttttttttttttgagatggagtctcactctgtctcccaggctggagtggcagtggcgcgatctcggctcactgcaagctctgcctcctgggttcacgccattctcctgcctcagcctcccgagtagctgggactacaggcgcctgccaccatgcccggctaattttttttttttgtatttttagtagagaccgggtttcaccatgttagccaggatggtctcgatctcctgacctcgcgatccgcccttctcagcctcccaaagtgctggaatcacaggcatcagccactgcgcccggccacctttttacttttaagtcaggtgagaaaaaaatctgccttttactttgtcacgggtcccaaagaggacgagaatttaaaaaaaaaaaaaagaagggagacctgatcatcagagcatatacagtgttgtgaaggcagatgtagtaaaatatattatctaaaaaaggactgaagaaactgaaatgcaacctgctaatgaagataggtatggaaaagagatatgaaataagtgcttttggacaagaagatcacaataaaaggatttctgtgaaaagactaaaaacacaaagtcaaataaaatacatcacagaatgtaaataatagacaccagctgcatgggttttaagactttgttgaaggaaaaatataaaactataattaagaatgagattctagaaaaataagaaacatacagacattcagcaatatctaatggtttaatttcacagaaaaaaattaggcatttattagaaagtgtatttataaggaaaccatagaatgagaagaatccttgaccctcctcaactttaacaattatgatacatcaaattcacttttgatggcagaagtgatgatatatttttttaaagtaacctagcctaaagtacgtccttaaccactatcatttagacaattttttacaagcccttgcgttgtgtacagtagcaagctcataagtggaaacattgggcatttagaagcaaactggtgatatggaattttattctctttttttctgtttttattctaaacaaaattttacttctacctcctactaagaaagatctccttatattcatttcctatatggtttggtatatgaataaagggtgataacaaatataaactaaaagatgggtaaatttttacatacactttcatagcatttatagagtaagaaaaataaaggaaagcaaaaaaactacaaacaaaacaattgagaagtgaaagtcaagggctttgactcagaggagcagaatgctggggtgagaatcctcatgacatatgaaaagaaggaacccagtacacacagtagacaattggcaattgagaaaaggagaaacatctccatggaaacagtacagaatgattctttccttgaccttgcgagaaagaaatctaccgtaattttgtcagactaagtaaggatttctgtggccatataaaaatgtgtaatgcaatataagaaagtactttcctcacatgtagttaaagatggatgattgttctgataaaaaatatgcttacagctaaacttgctgccacagtttaggaaaataaatgccaggcactagactaaaccaaggtgctcatgccatccctggcaaatagtaagctcacagtcatctcaaataactgcaagattaatagatgtttcaggaaacaataggtaagtaaattagagaaatggataaatgtgtaaagcttctatgctagtttatgagtgttttagcttagagagtgttaggtcaggtcagtctgtcaggtacttctcacaattgaaactgtataaaattaaaatactcagatttcagatttcagaaaaaaatgtgtacagtgagatgtgatgtacagaataaaatccttccatttgaaggaatatataatgaggatacctagaaaatggtctggaaagaatgttaataaattgatgctactcttttatttgactactgcaggtcagggagcatggatcatctgtgagcatgtctacaaggaggacaaagcgggtagtactatggggtctcttgcatgtaccatgcacactatagtctatgtgaatgctgcttcccagaatcatgtagtgtacaatcttccctttggcaatgggatgggtaatggttatgatgtgaagcaaactttttctttataacctatacattttttttgtttttgcagcaagatttttttcagataccaattttataatgagtgagaatgataatgagggacagaactaccaggtaaatattcccccacgtcttgttgttgtataacatagacatcctgaattagttttaaaaagaatgatgatttttttttcttctcacaacgctattattttaaggaggaaggcatgtgaagactttgtatatagagtcaataagaagattttaaacacgtgcatgtaaacttggccgacaagaggcacttggatctagagagactggcaacatatagcagaactttagcatagcctagagctctgttacagaaattatgagctgggagaagagacaatggtgagctgatggaagtcagagcagccaggttaattaattaggactctcaataaacactagaacaaaaataaagaagacagtaatccgctagaacaaaatggaaaccaaggagtcactacccacccatagacccaataacaatagatgacaatgtttgataagaaaattagaagcaggagagaaattagcattttatgaaagaggttgtagtcagttggacagatggatgtttaattcttgaatcctctatttacacatgctagtgtatcttcctctctggatctgtttccatataagggatataataattattatttcatacagacattttgttgtgttgttgatacatttgtgtgaggtacatgaataatgtatctaagtgtcttgcacaaatcctggcacataaatgttcattaaatgatgggtctctaccaacatccaatatgaaaaaatatttccatttcccaggggcttcagaagatgagtatgaactcatcttagagttgaagaatgtatcagacaggaacaggtcagaaaaagatcccaatctatgtatgtcatgtatttagggactcagaaggagacttatctcatgattagatggtgtgcatgggcaaagaaaggaaaaaaaatgctgctattttcataaaggctgaaaatgcaataattatgggaaagttgctaacaatgattttagatgcttgtcaaacctaaacaggaggtcaccagaaaaatgctctaaatctcttcactgtgacatccacatctaacactcatgcccttatttagcataattttacctggagctctattgtcctgagatcctagaaaatgtagtgtctaggtttctcccttgtaatttaaacaatacttcagaagttagaagacatgagtggataacaggaaacctgttacaggatacaacttgattaatatagatataataaataatggtgcttcctaacctcagttaggataataaataatacatgttccagttaaataataaatgttgtagtctttattacttgaatttcttacaagacatttaaagttcatgaagacagatagtagatctgtgtattttaatcattttttaagcgtccagaacttcagttaatcaaatcagtaaatatttcttttcttaaaatgaaacaatctgcacatatacaactccactctgaagaaaggcaattattttcataattataggaatttctgcataattatgtaaataattgcctttcttgagagtggaattgtatatgtgcagattgtttcattaaaaaaatgtatttattataattaaaaaaggctttatatatacataaagcctttaaggccttttgttttttttaaaaaagaagactgtccctccaaaagtggcacgtagttctacctgttgtataatcaacactttactaatttatggatttaatccactgcttatccccaagatttccgagatcccaagtccaatatagtcaaggctcaagatcaaagtacttacactttaccctcactacaccccttgccttttatactccaccaaataccacctcccagaagttgctgtaaaaagaataatttacctacatacatgaccattaggattctgccttgaagcagacatgcaggaaaatataatattccatcccatggcaacttttctttacttgttttgttgtaatatttttgtgtaccctaagaaatagtcattttaatagattttcaattatagactaatatttatcagggattcattataaaatatgctatgaatttccttgatggtgggagcagatagagaggaatatatggttccatctcttgaacctcctctgtgctctcttatctcaagtttatttcatcagtcaattaatctgcttctgttactgtgtctctagctccccctgcctttccctgtctctcaagcactgtggtttattattccttatcactctaataataaatgccagaagctatgtttcctcactaagacatatcctgggaagtcaataaatacacgttaagaagacaagatttctcaactttgttaagatacagatttctatcattaacaattctgatttagcaaacatttattcacccccaatctttctaacttagtttatctcccagaattctgcggccacaatttggtgtgtgaataactgattgaacttgcaacaggtggtgaatcattaatggcaatgtcaaggcttaaatcttgctccactggttcacccatggctgctctcacataccaagctagagttcaattagaaagttggagatcagtaactccagaacactggccagagggtcagaagagctgactcgtggacattctcattgtgggtaaaggattcattgggtttaatagcagtttatgtcattcttttctaaaaattagcagtaccagtagtctcatgatttaggtaaatttgctgttgattggggtagaatagtagaagtatattaataaaaatgccttttaaaaattacagagtattctttgcactgctgaagtgattcatgaatgagaaattttgaattactacacattaatattttttctagctctcatacctgtataagtctcagaaaggacagaagtgaacagagatgagaatgcaaccctctcttagcaaatgatcaagcgattgtgtattgttcaatgattaattgatattttaaaatgtttccaggaagactaaaacactttttgagaattatgttcttaattttatactcacagctactaaagcaagagggcttcttagtaacaaattatttttacagtaatcaaagaaaggttaaaataagagagtaagatacctaaggccacatggagagtaaatgtcatagctggaaatttggcaatggttttgtgattctcatcattttctattttgttttattttgtcttgtaatacagacttctctgaattattttatttctgacagagagtaatattagactaggcctttatttttacaaagcgtatgatttgtattgtttactaaataggtagataaataagtatggaccaaaataatgagcagttatcataaatgtttacatatatagaaaattgttttttaatggataacctatataaaataactttttaataaacatgtatggttcaagaaggacattttaaattaaatgttcaatgccattttaagaatttgattctctaaagaatatccacaaaatttgataccacattaaaaaaaagatgccaaataaatatatctagaatcctctagaatttatttattgacgaaatcataaggaaaagaattttcatatgtaatttattaaatgataagtgacttgtcatttcatttacttgggaaatagcataataaagtttttaggaggttttcctctagctggtaatttttgacaattaaaaaacttgacccagttttgaaaaatatttgaaaatacttgaccctgcccaaaagccacctgcaaatagcttatttgcatgaacattaaacacaagggctttcatgttccttttacttattactgggataacaaacctccattcattaagcacagcatcgtttttgttgtgaatgaaaaatcagccaactttctgccacatctggctgctaatctataagttttgaataaacagtagacagtcaattgccggcatccattctcttaaaccacatgaagttttttttttctccccagtcaaaatgccatttaatacaatttcatttcatttttcagaacaaccaaggctttaaaaatagatcaggttttatggtgcagggcgcaaagcatgtattagataatctaaggataaatctgttcatatactaagtctctcagtgtccaattgccgataaaagttcaaatagtcactgcagacaggataatttcactgtatcaaaaactggcatttgcattgaaaagtcatttctactcatttttgagaaaccagtagcaaagttattaattttataaaaaacctagactcaatctcagtgaagatcttaatgggttttttgctgggcaaaaagatgagggcagtttaactgcgatagctacaaaacatggcatataaaacatttatttaattgaaaaataacagctacagcatccataaaattcaaagcccagcattagcattttttcccactggttctaaatgaaccccatcctccttactttaaaccttcagaacagttgcctatagatagagttattagtcagacatttgggaatatctttcagtgtagccatatgaaaatctaccagagcacacataagaaaagtcgttcggtaatggaacagacagctatgcctcattaaaatgcttcaccagataaactataacaagactatttgttctcataatttgttacttttattaatgaagcctcccaatatgatgcccctcccttttttattagcagcaatatcaaattttgtcctcagatttatgcatatttgggttcatttcttaactttcttaaacttcaagtttatttaggcccctgtttcaactaacattttgctgaatccttatacatatttatgctatgtattattcccagctttaaaattcccgtttttaaattgatattaactcctcttctaaaccattttttctatatgtaatttatatgtatatatatgacatggatacagaatttccttttgtctcaaatttttgtttattccctattaaatgatgagtatccctaaattatagaagaacagttaagtctttgcaggttttaataaaaagtagccagaccagttctgtaactaaaaccttcactgacctcaattacctgtactcttatgtaaagagaggactagacattctaagaattatcatatagaaagtgaattagttacctaagtgagagtgcttttaattattttctcttttgtaaggagaactaaacttgcttccaaacaggaagagagctcaaaaagactgggagcaatttcaagaaggaaagaatgggatatccctctccttctggcactcagcattgcacccatcctgcaatggaaccatacatgatgagacagttttgggaaagtttgataggtgtcctcaagagtttcaagatgaagctaaacatggccagttgttgcctgcttcttgctttcaaaattctgaaggctacatgctcattgaggcagcttttgatggcaagatggagaaagagaaaagatgccagattcttcttcccactttagatgagtgaatatgctaaatataggccaagtccgtgccacagaagatgtaagaggcttcagatacccactggcaagtgtttgcaagaagtcagcaggagaacaaattacacaggttaacaaataggtagcacagagttacaaagaatttacagattcactcccgacagaagcagcatttgggtgcctgcctctcaatagaaaaagatcagattattaaaaaaaaaaaaaagcttctctcttttcttttaattcttcctgctacaattcttgttttccccgttacaatccgaagggacccataaacagcacttcaaatgtgtcatgtcaccctctcctggctgtaaggtttccactgaaaagtctgctgccagatatactgaagctccattgtatgttatgtgtttgtttgttctcttggtgcttttgggatactctctttttccttgacctttgggagtttgattatcaaaagactcaatgcctattggctctgagatgattgcttgttttctgggactcaattataaggaagcaaagaagggaggtctgggcataccgacatgcttacctgccatgcagatgcaactaaggaaaagctcccagatttaccaagtaaaagtacaagttgcccattgaatttaaatttcatataaatcatgaataatgtttagtatatgtaattcctaaatatttcatgggatatactcatagtaaacaatgtaaattcagctgggcatggtgtgctttatttgacaactttgaactgagtcttcagccaatcctactgggcctctttcagagttgtcccaaattgatgcaaagcagttgcatgtttgtataactacattagccagccatgggtcaatggctgctctctgaaaggaggcaccactttgggcgagttagttcattttagtttgtcttaggacaatatttagtgaaaggtacaggtgtgaatggtcagctgctgatgttccccatgagtgtgggatcgatgtcttcccatgaagatggggtctggatgatgaaccacagtgtctagtacaataatttctcttatgtgagcttcaagagtgatattgagttaatgtttctatatcctacttttttgttttgttgttttgttatgactttgttctcttaacaattaattttccaccttagtgtttcttatactgaggaattgtagctacttttactacagaggaatgctgaggaattgtagctacacatgacgattgcaatttcaaggaaagggaatttatgctgaaatatttgaataacttcccctcttagtttttactatgtcaaaaaaattcatataaatgtatccctttacacaatggtctactgaaatttttggtgaaactaaaacacagtattgccttttttactgtaaaagagaaaaaattaaatagatttatgtacagagacacctattacaaaaaatatttttaaatgaccctacactgtatttgcataaaagacttaatttgtcatttccttagaaatgagaggttaggggccaggctcggtggctcatgcctgtaatcccagcactttgggaggctgaggcgggcggagttcgagactagcctgaccaacatggagaaaccccgtctctactaaaaatacaaaattagctggacgtggtggcacatacccgtaatcccagctactcgggaggctgaggcaggagaatcacttgaacccgggaggcagaggttgtgatgagccgagatcatgccattgcactccagcctaggcaacaagagtgcaactctgtctcaaaaaaaaaagaaaaaagaaaagaaaagaaaagaaaggataagtctgaagaaataaggagaaataagataacttgcttgagaaagaaacatacacaaacttgatagctatggagtatactagataatccataatacgaacactcaggtttgaggagattctatatagcagaaaaggcctatcttcacaaaactgctaatttgataggaagtctaaccttatctttatatggttgttaatgttaaagcatggaacttttaaaggaccttttattttgtcaaacatttacttaagcaaagcacactgctcagtgcctggcactttaaaatactcaacaaatattgcttttattgttccttttttttatactcatgggaaaactgctattttaaataatctgtaattgtttactatgtatttgcaagttaaagtatctaaatgtagatagattttggtaattgaagataaaataatagccctgaaacaggaaaagtgaatgtaaagttgatgtcttccagggctagagaggtatgatataagacagtaggggctgcgtaaaagtggagactgtgtattcaacataaagatattcaaattcactttgaaaaaataatcgaattttcaggtagccagacttgagttgagacaagcagtggatctgaaaggccatgagagaagtgtggaaatgttatagtgtaaaacaggggtcccaacccctgggccacaaactggtaccgggcctgttaggaactgggccacacagcagaatgggagaggtggatgagtgagcattactcctgagctcagcctcctatcagatcattggcagcatttgattctcacagaagcaccagctctactgtgaactgcgcatgcaagtgatctagtttgatccttatgagaatctagtgcttgatgatctgagtagtggagcagttttatcccaaaaccttccccccaaccctgtccatggaaatattgtcttccacgaaacgaatccctggtaccaaagaggttggggaccactggagtaaacaaaattaaggcagtattaaatacgaagatgtcttagatgttattttcttgcaagagacagaatcttatttaaatttccttagtaaaacagaggtttaactaaaaggatacaaaaatatcttgggctcagagtaaataagaaatcattagatagctgtttgttttatatctagttccaagtctgcatggtttctagttcccattcatctgtttatcatcttctccaatacagattaatttggaaggctgttagtatttgctccctttaacttaagtttatccatggctttggactgctgcgacaattctggcccaatgctattagacttctcagttgagatgcctataattaacatactaaaatacctcattttctaaatcaaaattttgagaaaaagcttcatgtattatatgcttctccttgagttacacatccattcctacttttctgaactgtaaccagaaagaacggtcatggggcacaaataggattgggtttaaactctctgctttatcacaatgccagactgatatttagagcctctacatgtggaaaagcttatgacactccttcattgtacagttcaaaacaaaattattttgaatctgtaaaaaaaatacatactgaatctaaacagccaattctagtttacaaagttctggataagaccattgtcttagtccattttctgttgcttatagcagtatacctaaaactgagtaatttacaaagaactgaatttattttctacagctaaggaggcttggaaatccaaggtcgatggggcatatcttttgagagccttcttgcttgtggggactctcagaagagtcccaaggtagcacagggtatcgtatggcaagagggctgagtatgctaacatgctagctcaggtctatcttccccttcttataaatctaatggtttccctcccaagataacctattaatccactgacttatcgatggattaatccactcatgagggaagaactttcatgatccaatcccctctttaaaaagctcgttctctatattgtcatattttggattaagtttcaacatgagttttggggggaacattcaaaccatagcaaccatgaaagctgaacctttccaattctgtgcatggatgtttatatctgatatcctaattgctgaagcacagtttcaacctgcctgttgaaaaagtccatttgcaacccagcacaagtcgatcacttgctcgagctaaatctcattttgtctctcaaacatttttcccaaattcatgtcatccctctgctaacaaagagaacaaaggtttgtagatgtttcctctcccaaagatagggtgaataactgctttaggcagagaagatcaaagtgtgaccttattgagcacttttattggcttcagactagggtttcaacaagttcagactcctgtggctgcctcaccatgtctaaagaaattatgaatgatccatctccttagtgtgattccccacccacccactccaatccagcccttctctctacctcttttcaaatatttctctaagacttttcttagaccaatatgacttccctctcacctaacaccctttctttagcaagttatatttatgtcagattcttaatccattcaaagggaatgatgataaagaataaaagaataatactaagtattaaactgtgccatcttgcccttctctctccctgagaatttttgctaatttagtagccaggggaaatgattgcaatatctcctagtgatctggtggcagggggagcatctggtttgggtgagtcagtccctgactttgtaatatgacctggtgaataactcaatatcaataaatttcaacctgctgcaggttgctgaagttttatagaaacttagaagagctataagccaccaccataaatttgagaagcaaccttaggctcagagaaaaaactggctgttatctagctgtgaaacaaaacacataataattatatagtgaaacaggacttcaaaagagaacttaggcaaatgagatttatgttcaacatttttgtggttaattattccatgttgctgcttaataaattttctaatttttaagaaatacaattcaaaaatgaaagttttgattatattgtagggtattagcacatgttcagaattttcagaattggagttctctgctgccctaactgacaatgacaaaatcaagggtagaaacttaagcttatgcttatttcataatgctggtcaaattcaattaaaattagtaatgtaatctttgagtggttactttatatttgtgttctcaagcagggacaattttacttttcaggggatagttgtcaatgtctagaagcctttgtgattgtcaaaacttggagaggaggaggtacactactggccagagacactgctaagcatcctatagccccctctgcattaaataattgtctgacccaaaatgtcatagtgccaatgttgagaagctgtgctctacattcttcttattcctttattaaatcattattatgtgtgaagtgactgttacataactagtagtaaacaatattttattgaccacttatcacgtgccatgctctattctaagaactacatacattcattctatttatcctcactatactacaaaatagggtaggctataattccattttacagatgaggaaattgaagcacagaagaggtaacatccacaatcacatagcctgcagaagatagatctggatttatagtcaggtaatttggttttagaagcccatccactgtggtaaaggaaatcaagtgctgcttattatttcccttgactttctcctatgctcttgcaactctaagaaaaggaccttggcaaatctcaatctacagaataattcataattctgggagctccacagaaaataaaagttatttatttatttatttatttatagctgttgcagtgttctgccacaggtatagtcaactttgtctgcaaagttaaaatttttaaaatgaaagaattaacaattcctcccctaattatatatatatataaataaatgtaggccttaacattaacacaaatcattgaagtttcatgggtcaaaaatttaggcagatatgtagttagtaggcatcttatactaattagttaacatactacttcttttatttttattataatataaactatattcattttataatatacataaataaaaatcaaatgctaaatataataaagtttattttatatagtccagctcgctaatgtacattaatgcttcaatgataatattaaagtttcttttattttattacatttagatgcaaactccagccagggttcacatattgatttcacgttctagtaaaaactacaaataaaaaactataaagtcagagattatttcttaatatattgcatatactttcatccaatgtaagtcatttcatgacatgtttagctttttttgtcatagtggtctcatgttttaatggaaaatagtatgcaacaattttgctctgttttagatgtgatattgaagtttaaaacttcactaataattgctgcaaatataacacaacaagagaaagcactataatctattgaggcaaaacataatattaagtaactgaaaatggcagaaaactatagggtatgataacaatgcaacatgaaaagcaaagagctttatttgtggtattccaggttgagggagacattcaaatgcctattaattcctatctctaccaatgatcacatttatatggttctgtactggcatgttccctgaagtctactcgtgccccattagtggtaaaagaattaaatatttaaaaatatttacgcatattatatttattagaaaaaaatactgacttccatttatgttgagaatgtcagcaaatccaatcaactcttctcagtatttccttttttctttatttgttgctataaccagagtccaagccaacatcatttcttgcttataaatgtgcaattatttcctactatctccctttgctttcatttctgctactttatgttctattctccccagagtaatcaaagggatctcttaagaacttgtcaaatcatgtcactcctctccttaaagcaactcatgccgcgcattcatttagaccatacccaaacaccctagtgtgacctgccccatgaatcatattcagacctcatcatttgtatctgtactcccaattcacttttcttgagtgaaataatcttttttgttgttgttcctcaatcatcgtgagctctttcttgcctaaggacatttatactagctctttctttttctggaaacatctttttcccaaatattgtggctaattctgctggaggttttcagcttaaatgacatctccttggcatttctcatgaagtaaaatacaagctccacaagacaaggctgcaggggaagttaggaagggactacttttttggttttgcattctttgaaataaagcattatgggcaacatattaacaaaataaaatataaaaggaataccataaatcttcattttacattttttcctacaattattttctatatacctaccatctgtcattttctatctatttgctaaaaatttctcagcatttccatgtaagcaacatgcatattaactgggttgaatcctctgtgtcagattctattttataatccagagtgtttcacttgcaccttttacttccttaaagtcctaagataaacagttgcaaagagtcagactctttgaagctctaaacatacttctgctctctccgtcctaatagccaaaggagggcttttctgcattttctctattcaagttccttttgcttttcctaagctttgtagtaaaaatctgcactcatgttctgccatctgcttttagtatatttttaattcacccaccaattgccattttactgattatccccagaaggataaagccatttttagtaaaattctgctttaaggggaattgatagttgtggagaaataactgcacattgttgaagagtatttattagaacacagttccattgtatttgaggagagaaatgcattactgactgcaatgtcttgagtcaagaatttagcaagtttttggaaaagactttcataaggtggaacaggaatccacattaagttcttgaacacataagattgagttgagcaaatcaatcagagtttgacaaagtaaagcgatgaatctagttaaggtaatgaaataaattaatcccacttgcctcatataagggtttgaaagcagaaataaatgcaaataaaggaattagaggtagagttacacgtagaattgctggctctataatggagaaaagtcaagaagaatttgagataaatttatttgttggacaaaatactacttacaaaagagttggagttggatttgagttgttaatatataggtgtgaatgtgtgtgtgtatatgtatgtatatatgtatatgtacatgtggattctagaggtctagaacttaaattgtttggacaaaggatatggatttttaccaagtgtttatttaattgcattctaacaaaataatattcttataagtgtatgagaaagaccttctcccctatatttacttggaagattaccaattgtattgacctttcctaatttaatagataaaataactacaataataaaatttttattgatgtacttacagattaaacagttttcatattttttatgtttttgtaaattgtctctcatagctattgccactcctcacctttttaaatgtttattaatttgtaaaaattctcttaaggacatccacctttgaagtaaatgttgcaaatatttcccaatgcatattattgtcttttagctttgtttataatgaatttttacatttttaactataagactcacaaatatttgttgcatcaaacttatttatgatttccacgttggtcatttttcaataggccttctcacccccaaattattattattttaataatggtctttaaaaatatcaaataatatatgtattagctattaagtacagttagacttttttactaatataataaaaatttgcaaaatgataaataataaagtaatggatgattgtacaatgttatgccaattttccataatgttgttctaatattgtaatttgctttctgtcatacagaatgtaattttacttacggtacaaattttaggtaagagtagattcgagtgaatgaaggctggatgaacagtgatactgtacctaaacacaggttctgtgcattttaagaatcattgcagacatttgaatactggcaaatctttgttatatttaaataaaattaatatatctataaatttagcttatattttttcttttatttttatttatacacatatgtatataatatgactacaaacagtcaaaataatataaccaattcccacatacacaccatttagtacaaaggataaacattatctgtaccattcaagtactctgtgcaccctgtcttaattgattttaccttcttccccctcaaaatattatcttgattttctctaacctgttgtcttaaacaggtcttgaaaaaactgtggctgggcacactggtacacctgcaattccagctactcagaaagctaagccagattgcttcaggccagtagtttgaagacaaaaagtgctgtgaaaaatgttggctaggcaaagggatttgggaatactagggaaaatgttagactgctaaatgggtggttctgacaggcttcattcatttttaacttttaagttcaggggtacaagtgcaggttcattacataggtaaacttgtatcatggtggtttgttgtacagattatttcatcaccccagtattaagcctagtaaccactagttattcttttgtatcttctccctcctccaattctccaccctccaaaaggccccagtgtgtgttgtcccccactctatgtgtccgtgtgttctcatcatttagctcccacctatgagtgagaacatgcagtgtttgatcttctgttcctgtgttagtttgctaaggataatggtctctaactacatccacatcccttcaaagaacaagatcttgttctttttttatgtctgcatagtattccatggtgtttatataccacattttctttatccagcagaccactgatgggcatttaggttgattccatgtctttgcttagagaaggaaataaaagggtgttccagagggaatacccagtgccaagctctggttcaggagtgtggctgggatcctctaaaactgcaagcagttataactgagagttcttgcttaaagtgtggtttatgttcaaccatctggttataactgagagttcttgcttaaagtgtggtttatgttcacccatctggttataactgagagttcttgcttaaagtgtggtttatgttcacccatgtggttataactgagagttcttgcttaaagtgtggtttatgttcacccatctggttataactgagagttcttgcttaaagtgtggtttatgttcacccatctggttataactgagagttcttgcttaaagtgtggtttatgttcacccatgtggttataactgagagttcttgcttaaagtgtggtttatgttcacccatctgggactatacttttgaagtctatacttttggaaggatagatgtttgattttttttttttttcttttaaaactagtaagtcatttttgttcagttttttaagtgtctattttatatattcaaaagtaagttgataatgctttcttgtgctcattatggcttaaatttctactatgtttataagtgctgaccctcttttcatcatcatcttgtgtcttttgatctatctccttctttttctctttacttggtaaacaatctggctggaaatttgtctatttaagtatggtttttaaagaatcaactttattttttattgtactgcttccttctttctctttgatatatttttacttcattataatttacacttattttgtgtgtttatgtttatatttcttatataattccagcttttgctgtattcaacagtcttcctttttatgtgcaatttttcactgtcattaagttctaaataaagtataacttctatttttatttttctttgagtcataaattacatgcaagcttctgtttaagtttgcaaacaacagcattatctggctgcctctttttattgggttctttcttacatttgggtcagaaaacatagtcagtctaaaacagttttcttgacctctaaacattttgctaaattcacttattcaaaattttctgctaatcagaatattatgtaacataatcagaacataccacattacactctgataatcaattcactagaaagatattgtcccttatgtattaaaatttgttcattttttggaattctcagaaatgtttttcaagaacactttccgttaacattttacaaaatttaaaaatgcaagtaaatttatgcctaatcgtacattaagtatgattttataagtggcatataaacagattgataattcctttcctagagtgtagagatgccctatgcactgcaagacagtcaagggaaggagttggtttggtttaggatgcgtgataaagcatctcatgaagtatctgtatgctcagttttagaaaatggatcccatttctaaaaactggattcattgactacattattaaattgtttcaatgctgtattccactatatgttgcattctatagaatgtttacttaacatctttggaataatcattaagtaaacaaaaactgtcccctcttcctcaaaactttcttttattcccatgcttatccactgtcatcaaattaccacatctgacagaaataattttaatttcaccatcaattgctaggatattaatttagactacaaatagctgcatataaacataaatgaaaaaatatttttccactctcgttgttgaaacagtgggagtcctgaatgatttgatagctgtacaattaatcaaataatagactactggattaaatctcagtgaactaaaaatatctgtgcatagctgtaaacaaaattaaattaatatcctcagtacctcttatgcctttaatgctatcaggatcagtagatgtgattttaaatgacgattcatataaataggaatatacgtaaaatttaaaaatactaagtgaatttatacctaattgtactacattattaagtataattttctgagtgttactcctaaccagtagcaaatatgttatatatatgagatatatgatatgtgtatatatgatatatgatatatatgttatgatatatatatgatatgtgatatatatgttactgggtaggaggtacagtagcaagttttctttcttaaaagaatggtatactctgggtctaagaatgacaaacagatgatgtggtggtcacttaccagagtattttatttatactgatctgtacccctagaatattcaaaaatgaggatgtatgagatatataatactttttattctatttttctgagttttccctcccagttaggttttcggaatacaaacatggagcagttacatgacataagggcaaatagtataagaattattacactttattcatttgtatcttgtatacttcctctattgggtaaatggatagatgcaatgaactgctaaataatacctgttgaatccaacctgagtgaaaacaaaatcttatgcctattgaaaagcatacaatgtttgtagtagggagaaaggaatatgatagatgtctgatatttaaatgtaaaaacgttggccgggcactgtggctcacgcctgtaatcccagcactattggagtccgaggcacaggcagatcatctgaggtcaggagttcaaaaccagcctggccaatttggtgaaaccccgtctctaataaaatacaaaaattagccaggcgtggtggtgcctgcctgtagtcccagctacttgggaggctggagcaggagaatcacttgaacccgggaagtggaggttgtagtgagctgagaccgtgccactgtgcttcaacctaggtgacagagcaagactccgtctcaaaaaaaaaaaaaagtaagaacattatatgctaacgtgaatgaaatataaacaattttcaattttatattatatacaatggcagatcatagctgcacctgtaagagaagatcaaattaaaatcggttatctgtttgtttattctcttatcagtgcctggctttctagaaaaatttagctattttcatggaattctctgataaacattatgaactcatttctttctataatatgttggtaatattggccgtatataataatttagaatctcttattctcctttatttttctcagagcagtcattgccatttgacatgttatattttatttttgttagtttcctattttaccatacagctaattaaaatgaacttttcattaattcaattactgttcttttcactgttatagcccaagtatctaaaacagtgtctagcactaagtagtcaccaggtaagtctttgctgagtgaataaatcttagaaggaaaggagagagaaaatctagatcctttatagtatccatggttttctacaaacaggtagaatgtaatattttattattttgcaccatgtaagttagaatcattgtggaacatcacatttatacaattcttattagactatatctagatctcttttaaaataagcaagcaagcaagcaaacaaacagcaatgaagatacgctgaagaagttttgggaggaggacctacatctttacagtttcacccacaacttacccataccctccttcaatgaattcctagggcttcttagaaaatagtggatgcaattcaggaagtgtttgttttaaaacaccaagaatgatgactgtccaaattcagaatgtgttcatgtattccatagacaatgactgaatatctactaggttctgaaaaatgtactagttgctgtggtggataaaataataataatacactgtaagacagtcaggggaagaggttggtttggtttaggatgcatgataagatatctcatgaagtatctatatactcaattttagaaaatggatcccactcttaaaaactggattcattgatggcattatcaaattgtttcaatgttaaatttcactatctatagtgttggaatattagtccagtaacaatatgaaaccaaagatacatcactatccagtaaggcagtttatattattaccacatagtacaatgtgttaacagagatcaaagataaatgaacacttccaacataaaacgtataataatttacttcaggtaacatatttttaaattatgggtataattatgggcataatcataattactacttagaaatgtattatgtgtatcatttaacattttatatataacattttgaatttttaaaatatttatgggtccttgttgttaaaatgaagtggcgttccagaaatagttgattgtagatttgttgcacgtaaaacagagaaatccagcatttataggtaacaccacagttaagaggaaagaaaactaagaaaattgcagtagaatacttttgtgaggaaaaaatgaaatgtcaaagataaaatttttatggttctttaatcacaatcatcaaattgtaacaaatggaactttaaaattgaatttgtctcttgtctgaattacacctgagattatacctgcacaccaagtgaagaatcatatttcaaaatgcatttcatttggcttttaacacagttattctgttgaagacatttctgtaaagcttgccagatacaggaaaagcaatttaataaacactgtgatcaaataactactcaattgttcttcatcttttttaacatttaacaccttgcagatcattgctacaataaagtgtgttatccccttttcacaatgattcattaacctgtattaattgttctttacaaagttgtttttatacatcttactaactaccaatgtgaggaaaaggtctatgttgctttcattcagtagaaaacacatgcactttaataatattgtttcttaaaaaacacctattggtttgttttctttcagtttctcatttatcatcatttgttcatcttcactgaaagctgaacatatgcagcctaacaacaacttgaattaattgaatgtttcgtatctattctccaaattaaattttcagttttgctcaccttttcatgattatattaagaaaatgtagccataattgcttgtatgggaaaaattactgagaaagacattcagattaaatgtaggaaatgctctaaggatctttgaaaggaaagaaatgtcaggttctatattgtattcaaggaagataggagatgaaagtgtcagatatgcaaggcagataagaaaatagtttttaaaaataagtcatagacattctttttctgatagttattgaaaaatcctgttcatcaaaagatatcttaaatcaataaagatttcctcaacaaccagacaaaatcgttctgtgtgtgtgtatgtcttattggaactgtaattatatttacaatactataattagtcgtgttattaactcttgttactcactagaacattattggtaataagcagtgacatatcttaaagatttttcttgtgtcccagcgtctgcccagtgattaatatgttcagctccataaatgtttattcaacgagtaaattagtgactaggtactaagttcttattcttgtgtacagtcacctatcaaatctttccactcttctctgggcaattggggaagctatgtatagaaaatggaagagtctctgtcagcctgggttactaagggtgaacctgaactttctctgagtgaaaaaaaaatctattttactgagccacagagatttggatattcatattttatagcagtattaactaatacaaggtatttttaacctttaaaagaaaagaagaaaaagtagaagtgatactaatttcccagatgccatccaactcctctttcaccaatagatagcattgaaaggcgggaatcagtgcctcctcctagtgatagtgcctcagttgagcagggcttattccgaattcagtatgcaacatcccgacagggcaaatctagggattgctctcaagtcactatccaacatcccgatgggttgaatggcatgccaaacacagcaataagcactataaaaaagccaggccgccccggggtggggccacgtggcttcagaccagagagcggagctaccttggcccaagcgctgcagctgcctgaaccccggggcttcgcagccttgcttgttttctctgaaccgcaataggatggtgttcacagcgattcaaagggtggcattgggttggacgttttggttacgagccagcctattcccacattgtacgtgaatgtttaatgtgctctcaaaacatggaaaataagtttagtgcacatagctaaatcacaaaacatccgatttctgtttcctcaggaagtcattactgcgccaccacatcacgtgaccttaacatgatcaatgtatttctctgccttgacatttaaataaactatataaattaagataagtagattagaaaatcattcaaattataccataatctgtacaaatattgtgtcccctgccaggcaagggacagggtgccggcgacggccgcgtggccaaggccccgcaggaaagctcccaggtctccctcactctccaggtgccctttgcacccaacagtgcgtgtgaggaacgaactgctgtttgaacgtcccctgagattgtgcgtagccccgtgtaaatgtaatagcctccatggcttaattggctatcaagcgaattttcccagatgaaagcaatgttgggttaggggacgacggtgcagccacccagcctttaccagcagcgtgctgcagacgaaggcagtcaaggtgtggaggtgatcacgcaggtacatgtttttgactgtttaatttgaaagttcacattttttatgctttgcgttgatgtgtaatttttgtactcttggtgactagtttttgtcaaatcttttttggaatattgcttaaatgttttgattttatgatagtgaagcttgtattcagtgttttgtcaattaatattttatgctagtaaaaaaagcaaaagagaaaaaaaaaagatcttagtctgtttctaaggcccagaccacacaaagtatccattttcctctcttgtctataaaacaaaactcaccttatcaacagtttctgttctacccaaagatgttaaataaagtccaaggtagtgggatgggggaagtgatgttttattgtctatggcacgtgtgttcctaggacctataaaaaggaaagcaggtaaatgactttgatctgtttgataaatgatttttatcttgagtagtgtagtcacttaaatatgttgatcctccttctgggtggaaattatttcaataccatgttgtttttgttattattaactatatattattatgtatataataatacataaaagttataggaatgaaataaaaaattattgaaatcctaacacacagttgtagctatttttcattcatgtatttattaaatattattaaattattcaccacataataaatagtaaagcattttccacataatcatatctaccgttttattcatggaaatcattttatttgattatttaatatttattttagattaagcatgcatgtgtacatttgttacatgaatatattgcatgatgctgaggtttgggcttctattgaacatattatctgaatagtaaacatagtacccaataagtagcttttcaaaccttgccttccttccttcccctgttttggagtccccagtgtctgttatttccatccttttgctcctgtgtacccaaagtttagctctcacctataagtgaggacatgcggtatttggttttctgtttacatcttaattcatttaggatgatggcatccaggcacatctatgttactgcaaaggaaaggatttcattctttcttctggctacatagtattccatggtgtatatgcatcatagtttctttatccaatccaccattgttggaaaccaatgttgattccatgtctttgctatttcatatttgcaatataacatgcaagtgtgcagaagctctttagtttaatttggtctcacttgtcaacttttgtttttgttgcttttgtgttttagtacttagtcataaattctttgcataggccaatatccaaaagagcttcttaggtctaattctaggcttcttatagtctaaagttttacatttaagtctttaatcaatcttgagttaatttttttatatggtgagagacaggagtctaatttcattcttctgaatatggttagccagttttcccagcaccattaattgaatagggtatccttgccccattgtatttttatcaattttgttaaagatcagttggttgtaggtatgggacttcatttctggattctctattttgttccattggtctatgtgtctgtttttgtacccaaaccatgctattttggttattgtagccttgtagtatagtttgaagtcaggtaatgtgttgcccctgcctttgttcttttagcttaagattgctttggctattcaggctcttttttagttaaatacaaattttagaattgattttctaattctgtgtaaaaataactttggcagtttgataggaactgcattgaatttgtagattgctttgggcagtaaagacattttaatgatgttgattcttccaatccataagcatgtaatatttttccatttgtttgtgtcatctatgatttcattcagcagtgttttgtagttctacttaaagagatcttttacctccttggatagaggtattcctaagtatttcttttttttttttttctgtggctcttgtaaatgggattgtgttcttgatttggttctcagtttgaatattgcattgtatagaaatactactgctttttgtatattgatttcttatcttaaaactttactgaaatttttaatcaactctaggagtctttggtcagaatcattagggttttctaggtatagaatcctatcatcagtgaagaaataaaatttaatttcctcttttcctatttggatgccttttgtttcttgcttttgtctgatcattctggctagggcttccagtattaagttgaataagagtggtgaaagtggatattcttgtcttgttcttattcttatgggaattcttccaacttttgcctgtttagtataacgtagactaggtttgtcaatagatggttcttattattttaggtatgttctttgaatgcctagtctattgagggttttaattatgaaggcatgttggactttatcaaatgttttacctgcatctgttgagataatcttatgttttttttcattttaaattctgtttatgtggtgaatcacattaactgatttgcatatatttgaacaactcttacatcccaggtataaagttcacttgatattgtattatctttttgatgtgctgctgaatgtggtttgcaagtactttgttgaggattttttcatctatgttcatcagatatattggcctagggttttgttttttgtgtgagtatttgccatattttggtatcaggatgatataggttttgtagagtaagttagaggagaatctctcatcctcgattttttggaatagtttcagtaggattggcatgagctcccctttgtatgtctggtagaattcagctatgaattcatctagtcctaggcttctattacttattcaattcattctgtaattcattgttggtctgttcagtgtttcaggttcttcctggttcaatcttgggaagttgtgtgtttccaggaacgtattcatttcttctaggttatctagttgtgcacatagaaatgttcatagtagtctctgagaatcttttgaatctccgtgggactcgattgaatgtcgcctttgttattgctgattgtgcttatttggatcttttcttttttgttaatcttgcttgcagtctatcaattttggttacactttcaaagaaccaacttttcattttgttgatcctttgtgtggatttttgagtctcgattttattcagtcctgttcttatttttgttatttcttttcttatgctatatttggatgtagttttttttcttgttttactacttgctctgggtgcaatgttagattgttaatttgagatatttctatctttttgatgtaggtatttagcactataatctttcctttttaaactgctattattgcatcccagaggtttttgttcattgtgtctctattttcatttgtttaaaaaattctttgatttctgctttaattttattgtttacccaaacaaaagtcattcaagagtaatttctttagtttccgtgtgtgtttgtgtgtgagtgtctgtgttttagagttcctcttgctattgatttttatttttattctactgcggtccaagaagatgcttgatattatttgattgtttttatttcttgacacttgctttataactgcatatgtgatcactcttagagtatgttccatgtgaagatgagaaaaaaatatatatattgtggttgttgggtagagtgttctgtagatgtctattaggttcaattggtcaagtggcaaatttaagtccagaatttatttgtttagatttctgcctcaataatctatctaccactgtcagtggagtgttgaagttcccagttattactgaggggctgtctacctcttaggtctagtagtgatttctttatgtatcgtgatgctccaattaatattgggtgcatatttatttaagatagttaattattcttattgaattgagccctttgtcattaagcaataacatttttttgtccttgtttctgtttttggctgaagatctgttttctctgatatgagaatagaaactcctgctcttttatgttttccatttgcatgattaatctttctctatccctttactttgaacccatgagtgtcattagttgtgagatgggtctcttgaagacagcagatgggtgattctgatttttttattccaattcgccactgtatgtcttttaagcggaggatttaggccatttatgttcaaggttaacattgatatgtgagattgtgttcctgtcatagttttgttagctagtttctttgcagtctcaattgcgtagttgctttatagagtctgtggactatgtacttaactgtgctttttctgtgtattgttctttcatgtccacatttagaactcccttaagcatttctgcagggctagtctagtggtgataaattcccttaccgattgcttgactcagaaagactcaatctctccttcgtttatgaagcttagttttgaagaatatgaatgtttatgctggaatgtcattccttttagagtactaaaaatagacctctaatctctgctggattgtaaggtttcttctgagaagtccactgttagtctgatgggttccctttgtaggtagtgttgctcttttctctagctgtgtctgagatttgttttttcttttgtgttaaccttggatagtctaacgactatgtgtcttggggatggctgtctttatagtgtataacagaggttctctggatttctggtgtatgcatgtcaacatctctagcaaaattgagaatattttcttgaattttttcctcagatatgttttccaagttggttactctttcttttctctcaggaataccaataagttgtagaagtggtttctttacataatcccatatttcttgaaggctttgtctttttaaaaaatattttttctttatttttgcatgactgggttaatttgaagaatcagtcttcaagctttgaagtgtttccttctgcttggcctagtctgtttttaagtctcccaactatattttgaaatttatttagtgaatttttcagttccagaagttcagtttggctctttcttaatataactatgttgtctttcaaatcttggactgtttttctggtttctttgcattggatttctattttgtcttatgtctcattgactttccttgacatccatcttctgagttctatgtgtctcatttcagacatttacatctggtcaggatcctttcctagggagctagtgagaggctttggagatcacaaaacactctggctttgtgtattgccagacttcttgtgcttattcctttccatctgcgggagttgacacttcttttttgaatttgcttcatttagatggggtttgtattagtcagagttctctataggtaccgaagtaataggatagatgtacatttgaaggggagtttattaaggatcattgactcacacgatcacaaggtaaagtcccacaataaaccatctgcaagctgaggagcagggaagccagtccgagtcccaaaacctcaaaagtagggaagctgacagtgcagccttcagtctgtggctgaaggcctgagagcccctggcaaaccactggtgtaagtccaagagtccaaaagctgaagaactggaagcatccagcacaggataaagatgaaagccaggagactcagcaagtctgctcttctgccttctcctgcctgctttgtcctagccgtgctggcagctgattagatggtgcccacccagattgagggtggttctgcctctcctagtccagactcaaatgttaatctcctttggcaacaccctccaaacacacccgggaacaatattttgcaccctttaatacaatcaagttgacactcagtattaaccatcacagggcttttatattttttattctctttgaaagtatgacagtggtgtatgtgattgattggcttcatttctctgtagttgcagagggtgaagtttccatatatgttccttggttacagataggttgctgcagtggctttcacagatgttgcttgttttagcaatgtatttttatatgatggtataactcaaacttcagtctggtagatggacttaagagtaagagctggcaggtggggtcttggtgcatgcttgccctcactggagaatcatgagaaacaacttctttcagtgcacgctttctgggcccctatgggaagagctattgttgcatctgcaacagtgcactggggaggggagatggaggcgagacataattccttctccaagtctggttctgggccttggtggtgctcctttcagtggcttatgccatggccacattttctttgtctcatgtggtgctttggcaggctgcactcccccttcccttagggatggtccacactgaggattacatctctagggacacacaactctccagagacccaccagtccactgtgcttaccaaagtcagagcaggttttagggtatgtctgcagttgctctgatgatgcagtatttcaagggtagaggatctccaggcagggcagtggcacaatgggtgcaacaccagtatggagtctgcagcccatgattttcagcccagcaggcaaccatggagtctgcctagcttacactcccctgacccagcagatctcccacagacactcgccctggcggcaagcccaaccaactaggctttccccaagccatctgctcccacattgttgagctgctccaggcattctgtgccaggacactccctgggaaagaagctaccaccatcaggccatacccttcatggtctggtcttgcaaagggaggggtgtccagctcccatgcccccatgagaacccataccacacccttctctgcattctgactatggaggatcctccttcacttgagattaggttacaaatctcagctcagtgtccctgggtggtatacttgagtcttggggagttgggactgggctcacggatttgtcctctggcctctaagcttcaagcactggctgtgacttggggacagggtggtgagcttttcccaggctgtcaacaaaacactcaagctatgcagtggatgctgtgctgtggacaccctcttgcaggcgtgaccaggcatgagctctgggaaggggttgacaggcaagggggcatgtggaccagatgcaacttaatcacacagcactggtgatggggcctatcttgggcatgtgagcaggccaggcgcggttcactcccagcctggcggacagcaggaacttagccactcagtatgaaatggaggcttgtgggatgggcacctagggttgcattttgctgcagctgcacagcacaacaaagccttctgggctctgtgtgggttcaaactgtgcctctgcatgtgctcgaggcagctctcctaccagtccaaagatctatgagggtcgtagaaactcctgtaactaggatctcagaggtacattatgggtatgtagtgtcccagggttccttcactcaccccttccttgggtttgttcagggtatatgggccagtcctgatgtctagtgactctgagcagactgtcccatttcttccctcttcaaccatggtgtctgtgtcacctctgtgtcaactttcagtgttttctctcaaaagatctgtttaaaatgtgaaggtttactagatatttgggttcctctccatggaagaggcacttcccaactgcatctccttggccatctgccattctccaaatcttttttggtgcctatttttcctttttactttctgtgcttcctccttattctcttcctccaacactgatatgtactctgacattcaattctaaatatatatattataaaaaatagatataatgtgcatatatgtgttcattaaggatagaatacttggctgggcacggtagcttatgcctgtaatcccagcactttgggaggccgaggtgggcggatcatgaggtcaggagatcgagatcatcctggctaacacagtgaaaccccgtctctagtaaacaaaatacaaaaaattagccgggcctggtggcgggtgcctgtagtcccagctacttgggaggctgaggcaggagaatgtcgtgaacccgggaggtggagcttgcagtgagctgagatcatgccactgcactccagcctgggcgacagagcaagactccatctcaaaaaaaaaaaaaaaaaaaaaaaaaaattcagaaagaaggttactacatctgaatttctgaagatggttttagtagggatgaattcaatgtaatccatggattattcatgactttgtagaaaggttaatgaatgtttcttttagccactcgggttgggacctctgaatcaataggaagcataaatgagagatgtcaggggaggattgaaggatgctgatggaggtgggaaggcctgaagtgacccgcctgtgctagactgaaagtgattcaggccccacccaaatgcatgagcagtggagcctaaatccttcacaactgcacattagaggagagaggatttgaccatcatcctgcaattagagttactgttaatcaaggtaggaggacaagatgcgttcccacttctgactctgattgccctaaatagaggccctgagtggtaataatttgttttgaaactaggagacagttcagtcagtgtttcatcagattcatgttttgctgaaaatactggcacattcctccatttaatgaggagtcaccacaggtaactcaagggccttagtcctgctgcccacataagggagttctggtcctcaggaaatggggccgtatttgaaggtaacgaaagggataagatgagacatgatggtgtgatgagtattccagtgactgcttttggtaaatttgggctggcatgtgggtttcagttcctctgtctagaaaggaaatgctcctcatgactgacaaaagcaggaataggttttatcatcagctctacaccaaggctctccagttactagagtggtctctagaagacagcattatcagcaaattccattagcaactaacttgcttctgtggtgctgtgttgttgttaatagttttaattatagcagctgcaatgcagggaacctgatccaaaaaaggcacaaaccaaaacctgtgctcctaaggagattataagaaatgaaatcaccaacactggcctctctttgggaggaaactggaaatggcaagagggaccactcatgggctaaagcccagcacttgggtcacaactcaccctggagaggccaagtatgggccccattgcttcaggccttggctgtggatcacaccctggattcttctcttccaggtgcagctcagttgccgtgatgctccttgagtcaatgagctctttggtctgctcttctgctcaagcagaaaaggattggcacttcacccttgagaagctgacaagaaccacaggcttcttcaggcaggtggtggaacatgggtgtatcctgcaggtgctcacagtatctccctttgctcaggtgacggaggcttggggttttccagctcttgacctaaaattcctgaatgattgttttcaaatttcttaatgaataataggatgaacttgccacccctgtcaggggggaatggggttcctgaaagctgagaggccaggatccagatcctgagcctcttcaccaagcagatgctgtagagcaaaggcagcaactatctatctatctatctatctatctatctatctatctatctatcatctatctatctttccccttccctttaaggaaatcctcaggactaggtgagatcttagatctagtggagaatctgagctgctccaagcaaaacctcaggatcctgcaatctgaaaaggtagaaccaaggcaaatgtgggcagcaatacccagaagttgggtactgagcctgttagggagcatttttttcaggggagtgaagtaaacaatgaggtgtagagagcagcgagaatgagaagccaaatcacagactacaaaatcacacagcatctgtcctttctccctgggcagagagagtatgatgggtagtctccaatatagaaagcccattgtgtccttcagctcccccatacagtcgcagaacaagcctgattctgaaatttctattctctttaggctctagcctgattttctggctcataaggccaaagggagctggaaaagtccccacggcaggactcatggtggagagagaatgatctagaggattcaggcctctgcatactgtgtctgggtccctccttaaagaatgataaagacaagtaaagagcttgaagcagcctggagtccagccagaaacctttaactgagctttaaaggagatggtcacaacacttttcagaatactggcaaaggcctcctgtggccaggtttgtcctgggatgagcaaaatttaatgttaacctgctgtatctttgcttttaatatatctgcttgcccatcacaatgatgttatggttaatttcaccaatttggtaacctgcctcttgggaagtacgaaagtaagcaagggccaggtgtggtgactcacgcctgtaatcccagtactttgggtggctgaggcgggtggattgcttgagcccaggagttcaagaccaacctgggcaccatgacaaaaccccgtctctacaaaatatacaaaaattaaccaggagtggcagtgcatggctgtaatcccagctactcggaggctgaggtgggagaatctcttgagcctgggaggcagaggttgcagtgagctgagatcacaccactgcattccagcctgggcaatgaagtgagaccctgtctcaaaaaaaaaaaaaaaaaaaaagagagagaaagacagtgagggtgtcctgtgaatcaaatctttgaatggatgttttcttaactaaccaagacctctgtaagaattctgtctttgattccacaataaagtggtgtgaaattactataagcaaatgtttacatgtctcatttaatcttcacaacaatcctatgaggcaagtagaattgttatcctcattttctgagcgatgaaactgaggctcaggggagggtgtgaccttgccaagtccccacaactggaaaccacggaacaaaatgacctgagtcacacatgctagaaaaaactcattgtgcctccccatggagattcacaatggctatttctgttgcaatagaggatgaagcaggtggtctttccaatcaacagctgttaagaaaggctccagttctccccggggaatctcagaatcagactgaagattcagaagagcctttgctgaccactgagtcaaactccccagaatccttttgtagtaccgctgaccagtgagtgatcatcaaacctccaaagacttcggtaatttgcagattctagggaaaattccatgagttaacagaggtgaaatttgaaagttccatagagaaattctggaacttgaaattatcataggaagattattatgcaatttcgttcctgttagtagtctttaataaagagacttcaggtgaacattgggttgaaccaagattactttctcccattgtcaccattctgatttcagattgttccttgctggtttatatcctcttcaattccattttgtaccagatagaggcagagtagaaggaaaaactgaacaacaaaccgcatttgtgccagctcgagggataaacaccctctaaggagcatctcaagctttccacaagatttcaacagggtcaccccagttcacagccaggtagtgtgtcttcaatgtgtggccaatcgctgttggacaaacaggaggtgttttccccaggataccctgcactagactcggcatcttttcagtcttcttcttattctgtctccttcccagcacactgacactggaagcacactaagtcatcacatgagcaattcacaggtgccatgaaatacctcacaaatgtacagtactttaactgttgaccccatgtattaggtaagaaagatattattatttacatttatctattggaacttgggggcacagagtgtttaaattacctgcccaagggcacacaagtcactcgcctcttgtgtttcaattatacaatggcttagtgattctttctttcagacgattgttgtgaggagtgaatggaattaaatcaagtctatgtggaaagggcctggagtatgagttctcaatgcagggtgactactgtcagcaccaactagttatgataatgaccatgatgatgatggggaaataataacaccttgaagtaataataatgaagttagaacgatacccccaaatgtatgaaaattacatctataaaatgagttagtttataaatcgtgagaaaatgggcatcctcaggtattgcaggtagaaacacacaatggaataactcttgtcagcaagctaatccatttccaggaatttttattttttttttttttgagacagagtcttcctctgtcacccaggttggagtgcaatggcatgatcttggttcactgcaacctctgcctcccaggttcaagtgattcccctgcctcagccccccattagctgggactacaggcacacaccaccgtgcccagctaatttttgtatttttagtagagacgggatttcaccatgttgaccaggatggtcttgatctcttgacctcatgttctgccagcctcggcctcccaaagtgctggaattacaggcatgatcaaccaccccaagtccagaatttcctaacaaggtctcaagagatgaaggtgctactgttcagtgaccccctgctcaaaaacactgccctaggagatgggggctcttctatgccccatttttacaggtaaggctagtcatggaagtgggagatagaaaataaagggtggggtcaggttcctttctaaaaacctaaatgcatgtcaggcaagtagggcttagaaaagaatttaccctccttcacctctgtcacctcatccctccttccaacctccatcacttgtgtggcaaactggactcggagccagaaggcaccagaaaaagtggaatgtgagcctgcaggccatcaaggtgaagccctgaggatcccccggggccagtccctccactttgatgcggataagcctcagctagtgtcaagttgaaaggagaaaaagacaggtgagtcactgttaaagaaacaggttcacatatgtaggtctaggagcactgcaagtagttcttacagtgagagagagcaattgtgctcaactctgaatccagcacaaggaagtggtaattatactcaaggaggaggatgggggttagcagataggaaatgactatgagggaacatgaagggtaagggaggattctggctaaactgacctaacgagattctcgctgagcacaggccaaggttatctgacatcagctgcgggatggtgggggatgaggaccctgatcagtatatggtggacggggattcctgccagctaaactgacttagcagggtaatttcctaaaactgaattttacaaaaagtgcacagatgggtttagcagaaggttcagaagcctgaccaatgtacggtcaagcaaacaatttctgtcaccacacagaatgcatgctccagggaccatactgggcctcagcatcttcctaccccaccagcttccaggagggcattttgccctgggcctcctgggtgtttccttgcctgatcatttctaggagacaagagacttgcactttatcatctaggataaattcagtgtcagatttttaagcctaaatcggatgacagtgcttcagtgacaatctcagttatttaaaaagggaggttcattcattcaccagttctaaaggtgcacataagacattcttttttttttttttacaaaaaaattgagaccaagttaaaagaaaaagaatgaaaaaaatcaagcaacccgaatcccttatataatctcttcaaaaccccaaaccagggaaatcttctcaatataaacttgggaattttgttgatcactgactgcagtctggtggtttatacttattttcttgtgtcccgtttcctcccttctcccacccccagcccctcagcaggtgctgccttcctgtcttggtctcattgtcctcaaatcagacctgcaggtatggtcccaagtgcttctaaccttcatcctcatatccacgggatcccctgagaacccagcttctgttattgagaactgtcccacctgctgactaaggagtctgatctttattcagaatcattgctaagataccagaagaaataacatgtaagagtctagtatagaactcacagttctgatctgaggaactaacaattgcttatttgaatcactgtatttcctatttatattcttttttttttttttttttttttttttttgagatggagtctcgctatgtctctcaggctggagtgcagtggtgcgatctcggttcactgcaacctctgcctcccaggtttgagccgttgtccctgcctcaggctcctgagtagctgggattacaggcgcccaccaccatgcctggctaatttttgtaatttattttattttttttgagacagagtctcactctgttgcccaggctggagtgcagtggtgccatctcactcactgcaacttctgcctccctgggttcaagcaattctcctacctcagcctcctgagtatctaggattacaggcgcctgccaccatgcgtggctaatttttgtatttttagtagagacggggtttcgccatgttggccaggctggtctcaaactcctgacctcaggtgatccacccgccttggcctcccaaagtgctgggattacaggtgtgagccaccactcccggcctatattcatatttctattcacaatatctcctacacagtgttttcctgttctatggggagaaatcaggcagatagcagaagacacaggtcagatctcaggaagagtttctatggcctccaaacaagcatttattgattatagatgtaggggtgaatattacgaatatggggagatgtcccacaaggttagctcctatgctacctaatgcaccaggcagcttgtccataacttagtttaaatatatctgtcaggctccatgcccatttgctgtaaaagcaagattactgaggtaatcttagattttaaaatggaaaactgggcctcacaaaagcagttgggaaaattacctggagattgtttctaaggcagtgcccaactgtaccaagcaaaggacaacaagtacaaagtcagagcttcattaacttgatgattgattcattcacttacttaatgcaagacttcaggggaagaagagtcgctgagtggaggagacgggaaacaatgcattatgaaacgcccatggtctctggatacccacccagccagtccccaccctcctagggtctggtctcgaccatctcatcatgtgttttgagggtgcgttttcctaccagttgtttttttgtctttgagacagggtctcctctcgcccaggctggagtgcagtggtgcgatctcggctcactatagcttcaaccttccgggctgggcgatgctggtgcctcagcctcccgactagctgggaccacaggcgcgggccaccacactcggctaatttttgtatttttagtagagaaggggtttcgccagggtgcccaccctgttctcgaactactgggctcaagggatctgcctgcctcagcctcccaaagtgctgggattacaggcatgagccaccagcaacacgcccagattcttctacacccttaattgggaggtaaggcttctgcttgcaggctgtgcgttcttccagccagccgcacctttgctgtggactaaacaggaaccactggattacagtcctctggctctctgccctgcaggagattttaatcaaaaattctaggcctaagggaaaagcagggttaagctgaaaatgcacacagggctcctgtaaatttcttttcataaaccacccgcccagggcattaaatagggtacttagttgatccgaaccctccagggagacctccgacccttctcttcgtagcccccagctcccctcccccggttccactgaggcaaggggactgagctgctccacatgccaggagtcagcacgccggaaggccccgcccagcggctggcgcagccaatcgcagagcgggcaagtggtgggggcgggcctgcctgggcggcaagggggcaggggggtctaggggctttagaggtcaattagctgctttcgggcggccttaggcgacaggagactcctggacccagcacctgcccactgtgcctgtccacctgtggctacagcagctgagaccccagtgggctaagattggacaggggccaccagggacccagcaagtccttcagctctgtgagtgagggattttccggagtgccaggccgcagtattcccagggccggtgggggtgggacagggaggctcgaccccggcaaatcaggcagaggcgccccttgctccctgcaacatcgcccacgtcctggggccacagtgagcatgagcggagggcgggagcaagagccaggggacctggcctgggtccccagcccaaagcctgggaagctgcctacccacccctgtgtgggcgcggacactggggactctggcttccggtggttcggccacctgattcagtttatgctctgtgaggggagctggagtgttggcaggactggcccacctgcaggactgcaggactgcgggaacggcggtagatgggtgctctccttcccagtttgtcctgggaagacattcaataactgtttcattacaaggggcatttggaaaacatacttcaccttctgttgtgtattagccaagaacaaggtgtgatgtgacttcccaattattggggatccctttgtcccttcttgaaattagatgtcttcattcttgaggttttgcctggatgacctcagcacaattggtacaaaacctgggccaacggtttcctagtttcccggttgttgccttaagcttctcgcccatcaggtaccttcctgtccttttcgtagcctgtcatcatcatcccagaaaactgtttcaactcctacagctctggacaggctgcttttcattttggtgggtccctccaatacctccacttgccctgtttttctccagccacatccttggcctcttccacagtccttaggtaaatgcttggaagaataatttaaatatttttattctaccatggtggccctagtttctcagggggtagtaaaatggctttttaggatcggtctaatcagatcctcatttcttttcccttcctagatttttgaaacatgaatccttcactcctcctggctgcctttttcctgggaattgcctcagctgctctaacacgtgaccacagtctagacgcacaatggaccaagtggaaggcaaagcacaagagattatatgacatggttggtggcatctgaaactgtccaggggaacaccagagagatgggcattgctattgggatcatatggccagagagtggcttctagaggctggctcctaccaataagctaacacaataacttaatagcactgattatgagcacgatatgggcatacacccttgttgtgtctcagcttggaaaacatctcctagaagtgtcaagccttccctggccatggttactcttacatctctgtctgaagattcacttggttagcatatgttgggttttaattagaaataaatagcattggcggggcacggtggctcacgcctgtaataccagcactttgggaggccaaggcaggcggatcacaaagtcaggagattgagaccatcctggctaacacggtgaaaccccgtctctactaaaaaaaaatacaaaaagttagcatggtggcaggcgcctgtagttccagctactcgggagactggggcaggagaatggcatgaacccaggaggcagagcttgcagtgagctgagatcgtgccactgcactccagcctgggtgacagagcgagactccgtctcaaaaaaaaaaagaaatgaagaacatcagttacatgtttgcctttagaatgaagaaggatggaggagagcagtgtgagagaacatgaagatgactgagcagcacaatcaggaatacagccaagggaaacacagcttcacaatggccatgaacacctttggagacatggtaagtatgctgtgggctgcccagctctgtgcttcccctcctcagttctttaccaaattaatctcttgcttcttaacattttatttacttttctttgaagaccactgaagaattcaggcaggtgatgaatggttttcaataccagaagcacaggaacgggaaacagttccaggaacgcctgcttcttgagatccccacatctgtggactggagagagaaaggctacgtgactcctgtgaaggatcaggtgagactgtgttaggttcagacctcccatcaccccaggaaagccaagaagcaattgacatttgtgctatggtagactgtgcagcaacatgcagttcactttttttttttgtataatttttttgtttgtttgttttgagacagagcctcactctgttgctcaaggttgagtgcagcggcgtgatctcgcctcactgaaacctctgtctcccagattcaagagattatcctggctcagcctcccaagtagctggggttacaggtgcctgcctccccttccagctaattttttgtatttttagtagagatggggttttgccacgttggtcaggctggtcttgagctcctgaccacaggtcatccacctgcgtcggcctcctaaaatgctgggattacaggcatgagccaccaagcctggcctgtttttttttgtttgttttgtttttgttttttttttttgttttgttttttgagacaggtcctgctctgtcctgcaggctggagtgtagtggtatgatctcgggtcactgcagcctctgcctcccaagctgaagccatcctcctgcctcagcctcctgagtagctggggctacaggtattcaccaccactacacccagctaattttaaaatttttttttcgtagagacagggttttaccatgttgcccagcctggtcttgaacttctggggtcaagtgatccgcctgtctcagcctcactaagtgctgggattacagctgtgagccaacacatgtggcccttcatataattttgaccttttaaaatgtattgagaattgttttgtgacctaacatatgatttatcatggggaatgttccatatgcacttgagaggaatatatattctgcacttgttagatggagagctttctatatgtctgttaggtctagttggtttagtgtgttgttcaattcctctagttccttattgattttgtctagatgttctatttactgttgaaggtggggtgttgactgggcgcagtaggtcaggcctgtaatcccagcactttgggaggctgaggtgggtgaattgcttgagcttgggcatttgagaccagcctgggcaacatggtgagaccccgtctccacaaaaaaatacacaaattggctgggtgtggtgctgtgtgcctatagttccagctactggggaggctgaggctggagaattgcttgagtctgggaggcagagattgcggtgagctgtgatagagccactgcattgaggtctccattattgtaaaattgtttcttccttcaattttattagtttgctttgtgcattttggagcccttttttttttggttcatatgtgtttataattgttacatcttcttgtgatttgactctcttacgaacataaaatgtttttctgtaacagtttttggcttaaaatctattttgtgtggtattattagtatagccaccctggctctcttttggttactatttgcatggattatctctttccatcttttcactttcaacaaatttgtgtctttgggtctacagtgagtattttgtgagttgcatatttggattatgtattacattattaaaaaaattgattctgccgatctttccattgatgagattatttacattgaaagtgattactgaaacagaaaagttacttgaccgggcacggtggctcccgcctggaggtgaggctgcagtgagccatgatcgcaccactgctcttcagcctgggggacagagtgagattgactcaaaaacaaaaaacagaaacttacttatggttggactcacgcctgtaatcctatcactttgggatgctgaggtgggcagattgcttgagcccaggagtttgagaccaggctgggcgacatagcaagactcctgtctctacaaaaaatagaaaaataagctgggcatggtggtgcacacctgtagttccagctactcaggaggctgaggtgggaggatcagctgagcctgcggaggtcaaggttgtagtgagccgtgattgtgccactgcactccagcctgggcaacagagccagaccctgtctcaaaaaaaaccaaaaacaggctggatgcagtggctcatggctgtacccagcactttgggaggccgaggcgggtggatcactagaggccaggagctcgagactagcctggccaatgtagtgaaacctcatctctactaaaaatacaaaaaattagctgggtctggtggtgggcgcctgcaatcccagctactcaggaggctgagaatcacttgaacctgggaggcaaaggctgcagtgagctgagaatgaaacactgcactccagcctgagttacagagcaagactctgtctcaaagaaaccccaaaaaagaaaaacagaaaaacccacacaccaaagaacttacttatgtcatcctgctgtttagtttctacataaagtgttttgctcctcagtaccttcttttgtgtttggttaatgatttatcctgtaatattttgatcctttcttagttccttttctgtatatttttaaagttttgtttttagtggatactatgaagatttcagttaacatgctgagttctaagtctagttcagactgataccaactcagcttcaatagcatacattaactctgctcctttctctgtcccctagctatattgttacaaattatgtctttaaacaattagttcctattaacatagatgcatattatttcatgcatgtttttaaatcataaaggagaaagaggaataacatacccaaaatacaataatactagcttttatatttagctatatagttgcctttaccagtgatttttattttttcatatagctctgagttattatcttgtatcttttcattttagcctgaaggactcacttcagcttttttttttagcccgagtcttgctctgttgcccaggctgcagtgcagtggcacaatctctgctcactgcaaactctgccttctgggttcaagtgattctcctgcctgagcctcccaagtagctgggattacaggcacgtgccatcacacacagcaaatttttgtatttttagtagagatggggtttcaccatattggccaggctggtctcgaactcctgacctcaggtgatccacctgcctcggcctcccaaagtgcagggattacaggcatgagccactgtgcccagccaagcattctttttcttttttttttttttttgaggtggagtttccctctttttgcccaggctggagtgcaatcgggtgtgacctcggcttactgcaacctctgcctcccaggttcaagcaattctcctgcctcagcctcccgagtagctgggattacaggcatgtgccaccatgcctggctaattttgtatttttttagtagagacagggtttctccatgttggccaggctggtctcaaactcccgacctcaggtgatccacccgcctcggcctcccaaagtgctgggattacaggcgtgagccaccacgcccagaccaggccaagcattcttatatttttattcatttattatttttttagtgacaggttcttgctctgtcaaccaggctggagtgcagtggtatgatcatacctcaccgtaacctccaacttctggtctcaaacgatcctcctgtctcagcctcatgagtagttggaactacagatgcacaccaccatgcccagctaatttttttaatttatattttgtagagacggggtctcactatgttgtccaggctagtcttaaactgctggctgcaagcaatcctcctgtctcagcctcctgagtagctaggaccacaggccagagccaccttgtctggctaattatttttattttgtagagatggggtctccttatgtcgcccaggctggttgtggactcctggcctcaggtgatcccacttcagtctccaaaagtgctgaagttacaggcatgagccaccatgctgagcttccccaaccctgtttttttttttttttttttgagatggagtcttgctctgtcgcccaggctggagtgcaatggcgccatctcagctcactgcaacttccacctcccaggctcaagcaattctcctgtctcagcctcagtcagctgggactacaggtacatgccaccatgcccagcacaccaccactgccttctatactccgtgatttctgataagcaactgttagtcttactgaagatcccttgtacaggatgaatcacttatctcttgctgcttttctgtctttagctttctacaatttgattataatgtgtgtcagtgtggatctctttgagtttatcctgctttgaatttgttgagcatcttcaatgtgtagattcacaattcccatcaaatgtgggatatttttggtcactatttcttaaaaaaatctctctaggccaggcacagtggctcacacctgtaatcctgcactttgggaggctgaggtgggaggattgtttgagcctgggagttcaagactggcctgggcaacatggtgagaccttgtctctccaaaaaatacagaaattagctgtgcttagtggtggtatgtgctatagtcctggtgccatattcccagctacctgggaggctgactatagctggtgctatagtcccagctacttgggaggctgaagggggaggattgcttgagcctaggaggtagaggctgcagttatcaatgagccatgagatcacaccactgcactccaatctggacgacagagcgagaccatctcaaaaaaaaaaaaaaaaaaagatagggatgtatctgcatgactatggattaggcaatggtttcttacatacaacctaaagcacaccaaccagaggaaaaataaattatgctttctcaagattaaaaaggagactatcaagaaagcgcaatgacaactaatagattgagaggaaatatttacaaattatatacatgataaaggtcaattacctagaatatatatacttcaaagactcatttagagacagggtcatgctatgttgcctagactagtgttgaccttctgggctcaagttatcctcctgcctcagccttctgagtagctgggaccataggcctatactaccacaactggctgtggagtatataaagaactcttaccactcaataatgtggacaaaacccaatttaaaaatgagcaaaggctttaaatagaataaaaatgaaacatttaagattgttgaaagtggttgcctctggggagtggaatatggtgaggcagatgtctggattggaggggacgagctattgtgaacaataaaccttgtatcactatttggctctctggatcacagttcacaacaagggatgaatttgctccacaggggacatttggcaatctgaatatatttgtcattgttataactgaggggtcttcctgacatctaatatgtagaggccagggatattactaaacatcctacaaggcagagagagcccccataacaaagaattacatagcctaaaatgtcaatagtgctgaggtgaaaaattgtctaaagtatgtttgaggctgggtgcggtggctcatgcctataatactaacactttgggaggctgaggcaggtggagcacctgaggtcaggagtttgagaccagcctggccaacatggtgaaactccatctctactaataataaaaaaattagttgggcatggtagctcatgcctgtaatcccagttacgtgggaggctgaggcaggagaattgcttgaacctggaaggcgggggttgcagtgagccaagatcccaccactgcactccagcctgggtgacagagtgagatttcatctcaaaataaataaataaacaaatgaagtatgtttgataaaaatacaaatacaagtcaataaaagttatgttaaaaaattaaaaaatcataaaacaatcttttgtacaatatccacagatttacttttctttctttctctctctttctttccttccttccttctttctttcttgcttgctttctttcttttttttttttttttttttgagtttcactcttgttgcccaggctggagtgcaatggcacaatctcagctcaatgcaacctctgcctctcaggttcaagcgattctcctgcctcagcctcctgagtagctgggattacaggcatgtgcctgcttagtgggggtataagccctccttaccaagtagagaaaaaggggagaaaatcacattgctaaagcaattgtgttaagccccatattatctttacttgtggaagaatgcagctttgacctattattcgacacttagcacatataaaattttaggccttagctttcagttcctcagatcgtagcaaattgaagtgttaggctaacaaattagcttacaggcaataacagaaatcactgactgcactactactgacggctacagtaagatctctgataaaaacatgttaagtgatgctcactcaaatccgtaaaggtgcagaaatactcctctcaaacatagtaaaaataaaaacaatctaattatcttgtatgtcaattaaatgaactatggtatacctatgcaaagtactaaacagccattaaaaaggataacatatgcatgtaaattacttggaattatcacaaacatacatatggaaaaaggcaggtttcatacaacatgtataacatgttcccacttacaattttctttctcttccccattctttctccccaccatatatatattgtttataactttctatattatttcaactgtataatagaaactcatctttacaaaaagaaaaacacaactttaaaaatggttaaactattaggctggatgttgtggctcacacctgtaatcccagcactttaggaggctgagagtggatcacaaggtcaggagttcgagaccagcctgaccaaatggtgaaaccccgtctctactaaaaatacaaaaattaaccaggcgtgatagcaagtgcctgtaatcccagctactcgggaggctgaggcaggagaatcacttgaaccctggaggcggaggttgcagtgagctgagattgcgccagtgcactccagtctgggtgacaaagcgagactctgtctctcaaaaaaaaaaaaaaaaaaaaaagaggttaaactattaaaccattatgtccccccataaaataattaaagttctttctaaggactgtactcaattcttcctataaattttactttttagtcgacggaatcagtatactgtaatgtttttctttaactcaggggcccaaggcctagataatcaacttctttgaacaagatgtgatatattggatacagggctggtataagacaactttgaaatgttcaaggactgctttttataccccaaccctctccacctcccacctaatctgtaactctatgtcttagcacccttcccttagtcaccttaaaaatctcatgaagtcaacaaggacaacaaaaaacttaaaaacagaaaaaatctcatgaagtctaacctacccaaacctatccttcatgagaagtctaaccccacacagcacttggaaggattaatgccatattctagcctcatccactgacaaaagggctctctggtgctctccagctcctgtttgctcactttccattcctttagtgacatacctctgctggaggtcagtaaaactttgtttaaccactccttttctcccaatgtacaaatgacaaattggtcccgaatctttctagaggcatctacgaaagtattatgcttgctttaggattaagtaagcttgttacctcaaacaacaattccaactaggctggggcagtggcttacacctgtaatcccagcactttgggaggctgaggcaggaggatggctcgagcccaggaatttgatacaagcctgggcaacatagtgagatcccatcttgattaaacaatatattttaaaaacaaaaaagctggctgggcacggtggctcacgcctgtaatctcagcactttgggaggccaaggtgggtggataacgaggtcaagagatcgagaccatcctggccaacgtggtgaaaccccgttgtagactaaaaatacaaaaattagctgggcgtgatggcacgcgcctgtagtgccagctattcgggaggctgaggcaggagaattgcttgaacctcagaggcagatgttgcagtgagccgagatcacgccacggtgcaccagcctggcgacagagtgagactgtctcaaaaacaaaaaacaattccaattggagaagggctctggcaagtggcaagtctgaagcacacagtttgtaaatcacaaacatataatgataaaatccttctcaaaaacagtctatacatgttaaacatgaaacagcttcacccacccaaaacaaaatcacaaggtatcaattattaggcttactagttttctgctccatacaaaactaatgtattgggatgcacagattacaagtagctcctgaataacagatacgttcttcttttttttttaatttttatatttttgagacggagtttcactcttgttgcccaggctggagtacaacggcatgacgtcagctcactgcaacctctgccttccaggttcaagcaattctcctcccttagcctcctgagtagctgggattacaggtgcccgccaccacgcctggctacttttttctatttttagtggagacggggtttcaccatgttggccaggctggtctcgaactcctgactttaggtgatttgcctgcctcggcctcccaaagtgctaggattacaggcatgagctaccgcgactggcctaacaggtaaattcttatatagagagcacggtctgaggcagaagttcatcttttttaaaaaagcaacttttctaacagcatgtgactatagagtaggagatgaaagggtaattttggtgcacagagatataaggggatgagaagggtggagacatcagggtcctgcagaactttacataggtgatatttacactcacacaagggaatgaacaccgacctttcaaaagcttttccaaaaacagaagaggaaggaacactcctcaactcattccatgaggctagaattgtctggatacaaagactagacaaagacatcataagaaaaccatagatcagtgtcacttagaatagcattaaaaggaatacaatacttagttgtaagacttctacaatgagaactacaaaacatcattgaaagaaatcagagacctaaataaatggaaagacatctcatattcagcattggaaggcttaatatggttgagatggcaatactggtcaggtgcagtggctcatgcccataatcccagaattttgggaagctgaggtgggaagattgcttgattccaggagttcgagaccagtctgggatacgtgatgagaccatgtctctacaaaaaattaaaaagttagccaggtgcagttgcgcacgcctatggttctagctacttgggagggtgaggtgagaggattgcttgagcccaggaggtcaaggttgcagtgactgctgcctggtactccagcctgggtgaaagggcaaaacccttttggggagggtggggaagatggcaatactccacaaattggtgtgcagattcaatgcaattcctatcaaaatcccagcctctttttttttgttttgttttgttttgtagaaatttacaagctgatgctaaacacacatgtgataggatcagggctcaggctcaggtctgagcctcaatctgacactctctgtggagtgtcaggaaataacagataaatagcatcgaatttgaaggtttgccgagaagtgagagaaaaaactccctttgcctgcctcctaggcttcaaagctgtctgggccaagacgtcaatttagctgcatcatgggtcaatgaggcctttgcgaattaggcaaataaatcaagttactagagtttaagctgtgttttctttcagtattccaatgaatcactttttgacctttggaattattaggtacttgtcaagactgataaaatttagctggagatattgcagatatgggcgataaatatgactgaataaagtctgaaaccattcaagactataaaatgtgtttgagatttaggtgaggaggaaagaccttttgaaaattatgaaggctattaacaggctgaacatgacttcaattcaccatatctcagaatcggtaggtactcctataaaagtgtgagtgagatagttcactcatgttaataggctcctcgtaatgatgcacaaattcacagtagtgctgggtatgcggcacgtcaaaggcccaaatgccttttattatgaaagacaggccaaatctagtcaagttttagagttacctatacttactgtatttctatattaggttatttcatgacatttatttcatgacttttttcctaaaaatgaatctgaatagctttatttcttttctctttcttcttgagatgtggtcttgttttgtcacttaggccagagtgcagtggcatgatcacagctcatggtagcctcaacctcccaggcttaagggatcctcccatcttagtagttgggaccacagccatgcaccatcacgcttggataacattttcattttttgtagagacggggtctcgctatattgcctagggtggtcttgaacttccgggctcaagtgatcctcccacctcagcctccaaaacctccaaaaatgctgggattacaagcaccagccaccatgcccagactttatagtttaatttcataggcatttgtccatggtgggggaaatgctgagaaagaaagtagagaaaaatacactttatttcctatttaagtagaccttattttgtttaactatactgatactgatagggcaagtattatattattaagtaactattaacattctattaactatactgatagggcaagcattttattaaataattatgtatattctattcaaacaaattagaagccttctagattaaaaatatatgtatagaaaggtttaaactgcctgaaaattagaaggtaaatgacaaatatttacatatcataggaaagaatgttcagatcacacacaaagaacatataaacacagataatagtaagatacgaagacatcaagcaaacgaagatcagtgtcttcaaaaatgttgtatgtttggcaaaagctcctatcacaaatagtaggaggccgggcatagtggttcatgcctgtaatcccagctctttgggagtctgagatgggtggatcacccgaggtcaggagttcaagaccagcctgaccaacatggcgaaaccccatctctactaaaaatacgaaaattagctgggtgtggtggcacatgcctgtagtctcagctacttgggaggctgagacaagagaattgcttgaacccgggaggtggaggagattgcaccactgcactccagtctgggagacagagtaagactctgtctcaaaaaaaaaaaaaaaaaaaaagatttttttagatgttcccactttatgccaaaatctatgtggctacacataccaataaagcccttctttgctagctccatggtgaacctccttgtgatcttttccagttcgttatcctgtaaaataagaaaacaataaaaataaaaaaagatacaaaaatcgcttgagattatagctagcatcttattttctatttatagtacattttcatgtcttctcatccttagaacaactcataaggtaggcaatgccattttaaaggtgagaaaataagggatcaaaaaagtaggttataaaaacaagatagtagaaccaggactcaaattcccattctattaattccccactgaaaaatataccaaatcttaattaagattaattgtaatataattatattccatctaaatggtgaattttaaagagaataaaaatcatatctgtttatgtttgtatatagataatttagtattatgtaaagcattgtgacaaccagtttgaatttacttggaactgacaggataaaaagtaaggtttttattggcttagttaagatatttgtcactagcatgagatcctgaactaaaaacttcagatcacagtactacttttcttctttctttttgagacagagtcttgctctgttgcccaggctggaatacagtggtgaaatctcgtctcactgcaacctctgcctcctgggttcaagcagttctcatgcctgagcctcccgagtagctaggattacaggtgtgcgtcactatgcctggctaattagatcacagtgattcttttttttttttttttttgagacaaagtctcgctctgtcacccaggctggagtgcagtggcatgatctcggctcactgcaaactccacctcccgggtttactccattctcctgcctcagtctcctgagtagctgggactacaggcacccaccaacacgccggactaatttttcgtatttttagtagagacggggtttcactgtgttaaccaggatggtctcgatctcctgacctcgtgatccgcctgccttggcctcccaaagtgctgggattacaggcgtgagccaccgcacccagccagatcacagtacttcttaaatatgggtataggtgtctaataatatgaagatattaattaccttttaaataagaaaataataatacaaaaagcaaaaaaaaaaaaaaaacaagactcataaaaacaaaaccaaacaaagcagaaaatgataaaggatatagatattaagtaggtgacctttatatggcaaaacactcaatgagttaattctttacttttttcattccatttgaaaagcaatggggactattgatttcactgatatgggggatacagagaagcccagtaatttcaagtccttcataaatgcactgtgtgcacaaatatcactttgaggccgggtgcggtggctcatgcctgtaatcccagcactctgggaggccaaggtgggcagatcacctgcggtcagtagttcaagaccagcctggccaacatggtgaaaccccctctctactaaaaatacaaaaattagtcaggcatggtggcatgcacctgtaatcccagttactggatcaaggagaatcgcctgaacccaggaggcggaggttgcagtgagccgagatcgcaccgttgcactccagcctgggcgacagagcaagactctgtgtcaaaaaagcaaaaacaaaaacaaaaacaaaaactttcatacttacggtatagttcttgggatagatcttaacaccagctttagcacccccaaacggcacatctgaaagagaaggttgatggttgctattccatataaaggttaaaaaagtaaaatgacagaaagcgccacacaatattagaaaaacgtgtgatgctttaagcttgaatttctgaaagttcaagaaataaacctaccatcgttttctcaactgtactttaaacaacatttattgaacaggaattgttcaataaaattggctagccaagttctaatatatatatataaaacataataataattaaccaataataataaatacttaaacctctaatccatagattgcaaatgcaacaatgatagcttattttcttggggaacaagagtgggtggggacagagggaacgggaacaggacttttgctgaaaggagggatgacaggaacacagggctgtgggtgaaaagaagaacaaatagaagaaacagcagagaaggcggctggctggggtggggcgggcgcctccctggccctgctccaggactcaggactgggtcccgcctgggccgcccctcctgccaagcccctggcctcttcccagggtgactggcccactcctagaccctaggacatctgaagggcaggagtcccaacggcctgagagggtatgggccaggagcagcaggctgacccatctgggcccaaaagccacctgtgtttgggggctggaatgctgtctagaaagagggcgccctgggaaaggggcgcacgagagtttctctcctgagaggcccccatgcaggtcgggtcaacaagggggctttatctgccttgaggcagcgctccctaagtgaagcaggcctaccccagaagcacgggggcttggctggcgcctgaactccctgtgcaaggcagcacctgctcatggagcccctcagcctgcaggtgcacacctggtttccaagtcctgcctggggccttgctaggtgggggacggacctggaacaggaccctaagcccaccccctcctcatacctggcagtccagggctccccgcccagtggagccagcacaggctagccaggcccccctcctgcctgacccccggaggccaagctcctctcctgcagtagtgccgccctgccagtcaggtagctctgggggcaggggcaaaggagaagggagggccgcagccctctgggaatggcctttctgaggcactcagtggctggactggggctctggcaggagttggggcattaataacacccccatcctcccctgggctccgcctcatctgaccctccagaaccccctgccccaagcccctacacacactgttctattcctcagcccctctcaacgccctggcaccatggggcccaatgcatgtcctcccctgagagggaacagctctggggcaacgggcagcggggtgccctccctgccaccaagatttggtgcctagagctggtggagggctggccgcacctctctggggcacaccaggtcctgctcccccagcctatggctttggggcggagcccgaagggagagagcaggggcggtgggtgggggaagaagggggtttctgcggctcagtttgtggcaagaaagttttttttttttttcaactttctcttgtgtaaaaagttcacgaaagctcggcagcctctgcaaatgtcagcagtgttttctggggcgggggatcagggaggggccccaggcctggcctgcaacttgcgactgaaggtggcctcttattgcttagaaacgtgtgtttcggtttaaataccagacagtaaaaatagagctcgaggaccacccgcactgttgccaaatcagtgccagaatgaacagcttaaataaataaaaaatcgaaatatttacttctggataaaaatcgcagtaaaaccatttgcctttctttgcattatatataatatatatttataactgcccagctgcgggcggcggagccgagggcagcggaggggtcaggacatctcgatgacctccacgctgcccgagaagctcccctgcttgcccagggcggccagctcctcgccgcgcgcgcgcccctccaccatgccctcctcgaactccatctggcagctgcagcacttgaagtgcgaatccggggccagctcgtctgaccagctggtccgcgcgtcccgggctcagcccttgctgcctcccgccgtggcaggtcgctgcagccgttgggttccggggcgcccgcccggccgaagggcgcaaacagcaccctgcccggcccttgcacgccctcggggctgaagcaccgaggacgcttcagggagtcgagcggtggcgtccaggctccggggctggccggctggccagggcccggcagccgcgtagccgaagttcaggccgcgcgcggggtagcgcgccgggccgtgggcgtgcctgggcgcggcgtccgggcagggcgagggcaggcccagcatggccccgactggctgtccagctttcagagagcttcggggcctcgccggggtcgctgggcccgggccgccgggccgcctgctgggggcgtaggccgacttgatgtccagagagaaggagggcttgaggcggctggtgtcctgcaggtggtccgaggagaggcgcaggctgcgcaggccctgctgcagcgtgctggtggccgtggggggcgccgggggcttcctgcccgcgctcgggccgccctccctggcagctgcactcctggtggcagcggtctctgaggtaggtggtggcagccatggcagtggggccccggccgcagggctggggggaggctcctgcattcctgagggggtgcccgcgtcgccctgcacggcggccagcagcttcgggctgctctggtcctccagcagctggcccaggaagttgaagttgggcgagatggacgggcgctggtccttcacaaacctgtaggcgtcttcggaggacatgcccatggtcttcatgatgtaggcgatggcgatagtggcacagcaggagatgccggccagacggtggacgatgacttggcagctggacagcttggctttatcgacgaactcgatggacttgtccagccagggcagcagcttttcacagtagttgtcgttgatggggacccgcaagaagtggctctggtagatgaagtcaggcttggggcaggagttgctggcatagaggacgtagcttattccattctgcgtcatcagatccttgttcaggacgtcttcctgcgagcccaggtagaggtgaggcaggatgagggtcaggcccacgctgggcacgagcaggcaggactgggagaggctcatgggtagcagggcagcaggctcacccttgcagaggtcggggaagcaggaggagaaggtggcgaagccccccgtgatgatggccatgctgtggaagcagccggccacgctgtggaagcagccatccagcttggtcagcaggatggagaggaagctgtctgcggccgcgtgctctggtcatagaccaccacgtcctgtggctcagtggcctccacctggctgcgtgcggccggctggatgaactccacaatggtcaccttgcccttctgcaaccgccacttcaccagcttggagcagcagatgttgacggagctgagcacatgccagctgttgtactccaggaaggagtgactgtcgatgaccaggcccccccaggcccgccccgcagcaggctggccagcttcttggcgtccatcaccttcctggggagccggtccccggccatgatggggcaatgggtcttggggagggtgacccctgaagtgaggaggggctgctccgacggcccaagtgtggcctcgcactgggaataacctagcacatgatgccggaccttgcttgcgctcacctcgggggtgctccgaggacccgcaccgcgctcaaggcgcccgctcggctgtgcagtccatgggccaggcgggggcccgcgcagctggggcgggggctggggctctaatatatatttaatcagtgctcttcaccactttaaaaagataatagcttatttactctccttctactataatttggtcttatttatagaatatgttgaggaattgaaaacaaagatctagacttaaaatccaattagctccctcccgtaaaaaaatccctcccgtaaaaaaaggctatatcttaatttagagtaattgagaaatgatgcaggtcttaaagagtacaacttaaaaaaaaatcagttccgataaggtatatttctatagcatcttaacagtaacatgtttgtaaacatatttccccagagttctcattaggtagcaagaaaagcgatcacctaccaaccactgcacacttgtatgtcatcagagaagccaaagcttttacttcatctacactcacatcagtgctataacggatacctggtggtgttttttaaaaaatgtgttggggtgggtgagaaagaaggggatatatttagaacaaatttcagtaagtttcaaaaaagaaagctacaaattgaaaatatccactttttacattttatacccaagctatgtccaaaaacacttgaagcagctcatacatcagaacaccataaaaaatgaatataaaacatttaaaaaagctgctaataacagtaactatgatttcacaagacaaaaatcaccctgcaatgaatttctgtacactttccagaaggcttttttatgttccttttacctttggtttgcgtgacctggttgcagggagttcaagaattcagcttgcttttttagggggtgggtaggggtgggaaacagggtcttgctctgttgctcaggctgagcgtagtggcacagacactgcttactgtagcttcaacctcctgggctcaggtaatcctcccacctcagcctcctgagtagctgggaccacaagtgcatgccaccatgcccagctaatgtttgaattttttgtagagtcaagatctcaccatgttgcccaggctggtctcaaactcctgggctcaagtgatcctcccaccttggcttcccaaagtgctgggattacagggatgagccgctatgcctggcaagaattctgctttctgataattcacaaacatgggcaatgaatagtcaccaggttcaaaataccgtatgtctaaactgaggttttggcttcaaatgggtatattgaaagagatccttacctgttattctcctcacccactgccaacctctttcaatttgaagatgagaaagccattttcccttcctgaggttgagtgattcccttcaccacttctgcaagaaggggaggtagccaagcagacaggtactagtgcccctgtatctagtagccattacgtgttggtatagggtatacagaaagtggcgatgcccactgctttggctttggggggtcttggtcaattacccttccaagttttggagtgctaagccacctttctttctctataatccattgcttctcaatcccaaggaggaaagtctgagcagggttgatgtttgactgcacagtgcttggggcactgggtgtttgtgtgtgaagtttacccacaagaagctgcagcattttttctaccctcccactctcaacagattcagcccctctcgaggggctgggtacgatttccactgggagtcacaggtaagtaatgggagcctcagggacagctcttttaaagaattctgagaataaaagtttttcagatagaaaatatacaatatctcagggactggcagtttgagagaacttccctagtcaattttaaaagctagcttttttatatgtttctgaaaacatcaaccttaatattaacaatattttaagagaatgtatttattatacagatcataaagagcatattctaagctgaacatacttatttggtctactgtaaaaacaaatcatatttagaggagtatgtgcttacaactatatcttatacataattgattctcaaattgtgaaataaatgtactcattaaacttttagaatgcaaaattacaggtaatttttctagcacacagcagatatctgtatagctgactcccccatctcattcaggtctctgttaaaaacttcattctgagaggctctccctgaccactgtatttaaaagagcacctctttctcactcccactttcctgcctctcctaccttacttgtttcttcatatcgtttattattactgactttgcattatacatgtgtttagtatctggcttccctacctggcaagttagcaccacgagggcagactttgttatgttcactgctttaattccttgttcctaacatagaaaatggcatacattaggcactcaaatacatgctgaattaatatacgaatattctgactcttaaaatttaaaaaagaaagaaaagctatggccacaaaaaattttgacatacatgtacttttaaataacttaccataagcctccatacatatcatgaaaggactcagtatacaacattggggatgggggtgatggggagatgatggtcaaagggcacaaagcctcaattagacaggaggaataagtttctttgagataaattgcacagcatggtgaatacagtaaataataatagattacacatttggcccaacatggtagttcacgcttgtaatcccaacactggaaggctgaggtgggaggatcacttgagctcaggagtttgaaaccagcctggccaacatagtgagacctcatttctacaacaacaacaaaaagtactgcacatttcaaaatcactgagtaaatttcagatgttctcaccagaaaaaatgataattatttgcaattgtttccagtagtgaacaggttaatcagcttgacttaattatgtaatgttgtattcataaatcataaaattactttgtacctcataaatatatatctacaatttgtcaatttacaatttaaaaaataaaaaaattgaaaggctttccagtcagatgaggcccacagaaaaggaaaaaaaaattgtaaataatattaagatgaatcctttgtatcttaaaaaaaattgagttgggtgtgggggcatgtgcccgtagtcccagatgctcaggaggctggggcaggagaatcgcttgagcccaggagttgcaggctgcagtgagctacgctcaggtcactgcactccaccccagcaacagagccagaccttttctcaaaaaaaaaaattgttttaacactaaaatgtgcttttcaaattattcaaaatgcttctaagtaataccacatatttaatgataactacactaagccaggaaaatagtcaggcgctgtgcccaggtgacccagcctgcaccatccgcttgcatggaggggtgctaacgccaccctcctaggatgggcgtcacaactgcgaggaacatcgcacatggggaatctggcacggtgccctgcaagtggtcaaacaggcaaatctcaactgttaccactgctataacaagtattacaaagcaatggcatgtaacaaagcaattaaaaagtctaaactgacaggagtttgaacaaatgacttaaaccttggtttcattacttctacataaattcacgggaagtggtaaaacaatgtattaattaagaactagtatttcttctcccacacataaatcacttttttcattgctcttttagagcctgtggaagtcatcactacattatttttaattttcctggctttcttaagtggaggaaaagttattttcttttaacttagaaacttaaaaattttaacttgcatttagcagggagctaaaaactgctggaaccaatgatattcataaatcaaacagaagcattcaaatggcaagcctaatattctagaaatagatgttactaaaaattaggaaccagacctctccttccacacaacagtgtaaacagaatgtccattttatcataagtcatggaatgatatgggtcagaaactgtgtgtgtataacaagagacatgttccgctggatggaacccaggaattcttgtttgtaaagttaaattttctttcccagctacacccatttagagagctcaacctgctaaacagtgaagagaagcagtttcacaaattacctctcacaccacaggcattttctgtaggctatgaaccaataaaggttcagtgaatggaagtacaggaggagctataaagaaagtaccagcttagtggaagaagccctggagccaacagagtagggacaaggaggggatagaagtgaatgcaagtgatattgcctgggctaaagaagacacattttcattttaaatttctagttaaccagtgatacacacgtttttaattctagaaattggcaaataccgagtactgggctacctaaactgttaatctgaaaaacaaaaaattttaaagtgcacccattaataaaatactctgcggcaatacttgagacaaaacaatctccaataagacacaatgtacccacaaacagaaaaagccagttactcttccttctctgggtttggaaaccaaagataactatcaaaaatatactgtcacctgaaaattcttaactacattctaaggcacattaagagatttaagtaaggaggctggatgtggtggctcacgcctataatcccagcactttgggaggccgagctgggcagatcacttgaggtcaggagttcgagaccagcttggccaacatggtgaaacccccatctttactaagaatacaaaaattagctgggtgtggtggcatgcttctgtatttcctagctactcatgaggctaaggcggtggttacagtgagctgagattgcactactgcattccagcctgggcgacggtttgagactccgcctcaaaaaaaaaaaaaaaaaaaaaaaaaaagtaagactccaaaaaggaagttactctacttaatggattgggaaaaaatagcacaactggagaatgtgaaggacaaaatgatgtgacatatacatacaaagttctgaaaggcagggaaagcttagccctttttaatgcccattcccattcaaatatactcaatttgaagttattcaataaagtcaaataataggtaaatacatatgcatacaagaaaatcagaaaatcttaaaatatttaatccaaaatgaagcaagaaggatcttatgtggtctgaatattgtcactttttataaaaccaagcctttcctccttcagcagagaaggctgaaggtgaacaggaccaacagagatcaaacaggggcacagaacagaaactagggggaggaaggaagagatgttttattccagaaatggaggaaagtaaattatatttttgtatcccaaagtcttagagggttaggcatggtggctcatgcctgtagtcctagcacattgggaggctgaggcaggagaacttgagctcaggtgtgcaagaccagcctggacaacaatagtgagatcccatttctacacacacacacacacacacacacacacacacacacacacatcttaaaaccctgttagactccattgatgcattactagtgtctgggatcaactgagtctttggtcaactgtgctagtaggaatgaaggtaaatacttttaacaaagagcaggagtccacggctggctaagctagatagtgaatgggctcggtacacaggtgtcggccacagagctgatgccattagacacatggcctaaaaatcaaggccaccctgctgacaaagtaatctgtgcatccagctcaccagaggaaactgaagacacaccacccatgacgtttattatttatctatctcagtaaagctggaggaagggctagggacagaatgacgtatgtactacaatgggaacttttaaatcattccttctattctgaacagaaaccaactaaacagttattttatgttaactggtatccagatgtttccaaagaatattagtgaaatgcagacatctgcaactatacacagcacaaagcactgatctgatttttaacttaattaccacagatattccttagtatgctcaagtctaatgagcagtgcatgctaagtttctctaggagaaataaaaatcaaaagcagaaactagcttaagttgctacagtgatgaagaaaacaaaccagctcattactttaaaaaagattcagtgaaaaccacaattgactaagcttgaatttttcttccttttcctagctgactcaaaagcaaacacacaaaagcctccagctagagtcactgttttttttttataattaatcattaacaaaacatttatgaaaatccaaatggttttaaaattacttcaacctggttctcttaatagggtttgatttattcatcagaaatctgatttccagctgtactctctcacttttcagcaactatttataaaataaccaagagttctaccacaagcacagaacccccagaaaagcaaaaaggcctcagaacaactcttaatattcatacgttaacactcttgccacttactcatcagatcatattttttcacttaatattaatgtactttctaatccacaataatgtagcgtaacttaatttaaaatgaggagaggaaggttagaagcagggaggaactattaatgaccacccgtaagtaatgaccatctgaaatactatgtctcagataaaaattcagacattcagcatggggaaggagcactgcatataggagctaagaaaaagtacacactttaggctgggtgtggtggctcatgcctgtaatcccagcactttgggaggctgaggcgggcagatcatttgaggtcaggagttcgagaccagcctggccaacatggtgaaaccctgtctctactaaacatacaaaaaaattagctgggcgtggtggtgcacgcctgtaatcccagctactggggaggctgaggcaggagaattgcttgaacccaggagacagaggttgcaatgagctgagattgcaccactgcacttcagcctgggtgacagagtgagactccatctcaaaaaaaaaaaaaaaaaaaaagaaagaaaataaaaattatactttaattgctttagcagcatcaatgtactgttctgtataaagtaggcaaataccatcttagatttttaattcattgtctaaatcttttattttaacctgaataaattttgaaaagacaactaagctttctgggaagcaaatgtttagctgatattggaaaaatataatgtagtgacagatcaagaaaaaaaaggaaaaatactttttttcattaaaaatttaaaattataatacatatgtatgtatttctgtcaaaattgaaatacaaaaagaaagctgaagactcccttgactaccacttgtgaccccagtcttctctaagtgtatatccttccaaatcatattccctgcagttatatatgtacatatccataaaacatacagctttcttttatgttaggtatttaacttacagcctgatggatggaagattatgcattaaaagggggatcttgttaatttttttggtagattcttttattctgatcttgattaacagtaaacttagttgcactttcacaccaaatacctcttggaaacggaaatgatgctagttaaaatggcgaatataaacttggacttagtaaaagataacagtaacttgttattaaaaactttcaaagggataaaggcttgaaacctcaggtatccagtttcatgtaaattacttacaagtctaggtgatatttgagatgggtcttaagagaggaagaggaatcctagggagggggaggcgaggcatggacaggcagaaggactgcactgtgcaagggcatgatggagagaagtacatgcctagttttccagttttcctgaggataattttacaccagatcttctttattttaaaaatccaatcctttttcttaataacccctgtctgtccctgataccaccattttttttctaccagtctctcaggctagaaattttgtagttatctttgcctcttctctccatcctgtaaatcctacctgttgggaatacattactgtcctttcttcaaaatgttttatctgtcttttctttttcattctctgctattaagtataacttcattctcagttccactgctgcctagctttctgtgtcctgctaggttcatcattatccatccaacaaacataaaaggaaaactgtttctactcacacacttctgaaaccaaatgtgtgggttttccacactaagcagttctccagttctctctgcagatacaaaccgggtgtcctgcaattcacttctgaattgccatcaactaagatcataagactgctgagcagttggtttgagagggaagattctgagttctgtagggcatatcactttggaaatgtccattaaacatccaaatggatatgtcatggaggcagctggagttcaggttagaggtctgagtcactgataaaactttgggagttgttggcaaatgatagcgtattggtcagagtccgattaggaaagagaagccacacagtcatttgaacaggaaaagtgtacctagggaattgttaattgcaacagggaagtggagtaaccaggcacagactagtaggaagtataggaggagcagctactagtctagggctcaggtagagaactcaggagagtcctcccctcttagtgccctgcccctgcacctcatcagaggaacccagccatggccctctgcttgtcaggagagtcaccgatgctataccactggaacttactagaaatacttccttaggtgctggggaaaggagcggtgtctcagaagagttactctataataaaactgcctggagctggtgagaggagtgggacctgctgggcactggccactgtgtccctggtgaagtcaaccgcctgcaggagccaggcgagggagcataggagaaccagtagcaaagacagctttcacctacaaagtctctccattgctctagataggaggtggtggtcagagtgggatactgtgagggttgcagtccttggacctgacaaggtctaaggtctgatcatggagggagggggaagctgaggtagggcagaggacaagaatgggcttcatgagaccaaaaggatgttagaaagattatttacccggctactgacatctccaagaagtaagaggcctagtgtgaagaagttacaacatcctaagctcttcagggataagggaagcatgcgccacgtaggtagcctccctagtgcagcacccagtatatagcctatgcagagtgaatacctgggggctgctgggggtgataacaaggtcactgtgacaggacctgaagcctgggggtctcggtgacaggagtgggcctagttttttgatgtagaattgagccttgcatgcaccggtgggatcatattgaaaagaaaccctccaagactagaggaagatgcatcctctgacaatgtagtctctgtaggcgtcccaagtagctgggctggggattagatgggctccaaggcatttcctcaggtggcaatgggtggatccctgggaaggcaaagctgtgcaggaagaaaatggcaagatgctaccttccctcagggaaagcccctttcccgggagcagggaaggcgaggcagtttaggctgggtcagtttgtccctgccctcagagtctgttggtcccggaaaaagagggccttattttatttatttatttttctttgagacagtgtcttgctctgtcgcccaggctggagtgcagtggctcgatctcagctcactacaacttctgcctcccaggctcaagcgatcgtcccgcctcagcctccagagtagctgggaccacagggaccacagggaccacaggcgccctgccacgacgctggctttatttttatttatttatttatttatttatttatttatttattttttgagagatgtagcctccctatgttgcccagattggtcttgaactcctgggctcaagcaatcctcctgcctcggcctcccaaaaggctgggattacaggcgtgatccaccgcttctggccaaaagagggctatagggcacccccagaacgcgagatctccctcgtctgtcatctttacagaggaggaagtggactcccaatccagccatagtccattcgccccgggcacggtgactccggggcggccagaaccaaatgtgtctcctggcttttgcacggcatcaagtaacccgcgccaggccgcacagctgccctggccttcagcaaggactccgcgagcgaggtgcaagctgctggggagtgccacagcaggagctgaggcagcggattccgagggcggggtggggctgaatcgggagggacgcggacccggtggaacgcactgcgcagacggcgccggcgccagcactcggccgttgacgagtctttcttccagctgtcccctgaaagtcatccaggcggcggtccctttttttctgcctttttgtttccctccggcgagtcggcgcgagggtgaatttccgtttccggcggtgtccaagcggacctaaggagtcgcagttgtgaacaggtttggtgccgcgggctggggtaggcggcggttgggtccgtggctctggggcactgggaagatcgcgagtcgtgcgcatgggaaggtcctcccccggtcctccgggtcatctttgctcccgaggagcggcatatttcgcatctgcctgaggtgtgcccgggggtcgttgggagagtgacgggatgaatccctgcagagagcccggactgggagggaaggtgtcggggagacgtcgtttcctggcgacgtggtcccggcaggcgacttagacctgagccgaatctgttgaccccaaattgtgcttttcccaccaagaagaaaagggagagaaacagtacaagttcggcagtaaaatatagtagagaagcaatataacctctgaaatcacacagctattcagtttcaaagcgttcctagtgcccagctctcctaactcccggccagtgttccttgacatatggtgatatataaagactttctgtttccgctcgtgtgtgtgtctgtgagaagcctctgactcacttctgtgctccagtagcaccctctgcagccttgcaatgtagcccttattgcatggcacggaagatactagtttggatttcctctgccaatcagaccatagctatatccattttctggcacagtggctagcacatcatagacagacacaaacatttattaaacggaatgaatacaggaccttaactgaatgaaatggtaccctgccccgctttttctcaatcaagctgtcagattttatgcagcccgatattccaaaaaaactcacagattcagtgactaccaatttattggccacagattcccaggtacctcagaaatcactggaagggtctctgtaagtccatggggtctccaggcatcatctaaaaccagtcatatctcacacatacagatattgctatttttcaaatgtatgtagatgagctgtaatttagaagttttagagtcaacaggtactaaaagtaatactgcgatcctattggaagttcataaaaacgttttaaattttttattgaaatttaagttctggtttaagttaggaaaccacttcgttagtccagtcgatgtctaggtctgagctgtccagtatggtagccacatgtgactatttagagttagaatgaaattaattaagaattcattttttcagtttctctgaagtacattttaagtaaccacatgtggctaatggctaaatggctgaaaagtacagatatagaatatttccatccttgcagaaataggtactggtgatgttgacacttgagatgaataaaaagtaacttaaccatagaatgtaaccttagcagaggtaactcatctaatttatagcataacagagagaaatgaaattggggatggttaagcagtttctacccttgttcagtgaacaaatacatcatgtcttcataaagaaataaatgaaatttaatgtttttccctgggtattgcctggattgtaaaatgcttctcccacctccttaccccaaccttcttccttgtaggttagagttacttgttattggtaaatagccactatggagactaaggaccagaagaaacacagaaagaaaaacggtggacccaaagctgcaaagaaaaagaagtggcatctgcaggatctccagctaggagactaagaaaatgcccagaagagaaatgccaatgcttttgcagttcagtctgctgtgtggatgtctcgatcctttcacaggtgtgtttagctacagtctgatggttcttccattgaatctttttaaatagttaggagcctctcacaggtgacatttggattcacaagtctagtccagctccaaaggacatggagatgcatgctgtgtggcttttactaaaacgtgagaagacttgccatagaagctgccttgcctccagcatctgcacactggttggcgtttcttgcccaagatacaagaatttatagaatttgattcttcctaaactttaaactgtttctatggtgataagtgtgctttttccctctggatatgttttacaaagttgtaatataaaatacaaaaattacaatatgtaatactaacatagctttatttagtgagtccttatgatattcttagcagtgtactttaaacgttattcaactaaatccttccagcagccttaccagagtaggaatcattcttgccctcattttatggacaagaaaactgaggtcaagaaaacaagttacctccaatcatacaaccagtaagtcggagagccaaatttaactccagagcctctgctcttatctgttatgatgcactgcctcagtatttaccttttggtttttaaaaaactataaaaatcactcataaagcagtcagatttaaggtgtgtttaattttcaactctatactattgaagtcatcttgttacatctttattgaacagcaattgatttggataggggtcagaagttaataattgacaagttacttatatttttatattgtctgttgtactctctataaaatatactaaagtactcatatctgtaattatactaaaaaaaagtctacttataaggttgataccttttactctattttaaaagtgagtttactttttttttcttttttaaataaataggactctggatttgaagacacaaaagcatcatattccagtggttgatggaactccactagagccgccaccaataccggtagtggtgacggggcctccaaagttggaaagagcactttgatataatgcctcattcggaacttcacctggcagaagttcaccgagatcagaggccctgtgacgatcgtgtcaggtaggagatggtgccacagacacagacttggcgtggctgttgtcatctgagggacatgcgtgtgtttgttgttttcttgagtggaacatgttaaatattgtcatatcatgttacctctctcttacttttactaagttagctataacttcataaaaggataagttcccagagataaggatgtgatacataccttatcctgactgctctatggctttgccaagcatgttccttggaagggcctgacaggcctggtcactgcgaacacaccatttaacagacagcacgtacctcctatgtgccaggtgcacatgcttgcccttatgaagccacatgctggtggaagtgcgcgttttctctttttcctatgagaatttgtctgctttgggagatggtgacctttccaagtttgagggaagatgaaacaaacgtccagtggtagaatggcaatgtacactctgaaatctcttattattgcagtaatatagttggattgaggcttttctttatctttggcgcatccatattttattttcctttttttgagacagagtcttgctctgtggcacaggctggaatgcagtggtgtgattacagctcactgcagcctcaacctcccaggctcaagcaatcctcctaccttagcctcctgagtagtgtatgccaccatgcctggctaatttttcttttttttccttttttttaatttttatgtttttgtagagatgggatttccccatgtggcccaggctgatctcaaaactcctgggctcaagggatccacctgccctggtctcccaaggtgccaggactacaggcatgagccactgtgcccagccaatattttcttgatcattttcttattaccttaatttagaaataattatcattgtaaatattctgttgcattatgtttgaggatgtttttagcgatagtgggaatacaggaaattttgatagaggtgaagacattggcctgcagctgaacagcaagatcatggttatcgtggagcctgtctagtcagaattttccctgttttgagcacttttattcatctgggtaggcttttgatattatctaaatttagaacacaggaagaaaaacaggatggaatttattttaccagtttttgcctataaaaatgaacttctggtacactcctgtaaacgtatgtggtgttttactggatgcaattaaaaaatgaaaattaagagttgatggttagagttttttcagggtctttttaaagtaaaattttcatcttttcacttataggtaaaaagcgcagactcaccattattgaatgtgggtgtgacattaacatgatgattgatctggctaaagtagcagatctggtaagtgagcaggggcagcctggggtgctgatggagacttacagcattgtggtaggttatttaccccgtgatgaagggaagagagttttgtgattattaaaaggatcatggtcattatcagggatatagtagatgtgattgaattgatgatgataataatattagtaataaatgttgtcatattaataatacaaatggaatgtgcacaatgaaatgtgttccaaaatctaaaagcaaatcacaggatggagaaaacctttaatgaacacagctaataagagctcattaacattcatacatatatatgtacaaatatatcatagtaagtaccatttcttcttggatccttcctggcactgtgctaactgctttctacaaatttagcttacataaacccttgatacacccttgaggtgagtaggtattatctatagtttacataagatgaaatagagcctcccagcagttaagtaacttgtgtgaagatgggacccttgttcctgatggttctagaaccttcatccttaatgataatgctaaagtaagtacatgaattgcctgaagaagtggtcagagtttatcaatagaaaatttagatagtactcagcgtgtggaaaatgtacatttatggaaatgataatgttcactatctctgatattctatgatcttttacattagcaaaaaaaagaaaaaaagaaaaaaaggccagacacagtggctcatgcctgtaatcccagcactttgggagaccgaagtgggtgaatcacctgaggtcgggagttcgagaccagcctgaccaacatgcagaaaccccgtctctactaaaaatacaaaattagacgggtgaggtggtgcatgcctgtaatcccagttacttaggaggctgaggcaggagaatcgcttcaacccaggagatggaggttgcggtgaggcgagatcgtgccattgcactctagcctgggcaacaagagtgaaattctgtctcaaaaaaaaaaaaaaattagcaaaaaaataagccatattgattaggaggtgtagggtgacagataccttgtttttttcatttttatttagtttttgctagagctacagattttatactttggcctaggaagactcctaaaatataaaggaaaaagtaatacagattttaaagttgtgccattgtaatgtcagaaaactaaataacattcaaattttgaacatgtaatgctactattagtaaaaataagtgtaattaatgtaaagttgtgtaaagattactaaacttgtatacttgaaatgattgaatagttcatagaagtcatttgtttctcttttatttaaaatgtagcaagtttctaattttaaacacatacatattaagagatgcatttacatttttttagttttagttattatggatacataatagttgtacatatttatggggtacatgtagtattttgatagaagcatacaatgtgtgatgatcaaatcagggtaattcagagatccgtcacttcaaacatttatcatttatttgtgttaggaacattttaatttcattcttttagttattctgaattatataataaattatagtcaccctattgtgctgttggacactagaatttattctatctaactgtgtttttgtacctgttaacctttccctctttgtccctccctccctgctccccttcccagcctcttaaccatcattgagagagatgcctatgtaaatcttaagattttcaaaaggagcacacacatttggtaaagcactctaactgtaatgcacggtacacacaatgcgcattttctctttccttgctgtaacctctggtctctcaggtccctgcagacctttatatatatgtatatgtatatgtatatccttccagatacatataaacacacatgccaccctttaaaaacacaaacggtagcttattttatacactgttctatgctttgcttttttcatgtaatatatcttgaaggtgtataatcagtaagtactgtagctctgcctccttctttttaatataacattccattctgtggatgcaccataatttatttagtctagcttatgttgattgctctgctctgggttgtcaaagcctcctgagtacagcagaggcacacacagtacgtggatttgggtgtgtacgtgcgtgtgtggattaggggagtgacactggcttagatggcaaagattggcagctgagggactgtttgctcccttttattcctgaccctacaaccagctgcttgtcccttggcactctggcatcagatgtggtgtgaggatattccacctgttctttgagctggtccagtgttgctggagagctctgcttgctgccttggtctgcagtggcagctgtgctttcctacaagcccaacttcatatattctgtggttttgggttttgaatgtttcctagtttaatcaaggatgggcatttctgtttccattttgtgttatttttagttatccatggaaagatagaaacagaactatctttagtattaaaattacaagtttccaggaatcagttctgaaattattttgcatctttgaagtgtcttaaattttaaaaattggtcttggccaggtgcggtggctcacgcctgtaatcccagcacttcggaggccaaggcaggcagatcacggggtcaggagatcgagaccatcctggtgaacactgtgaaaccccgtctctactaaaaaaatacaaaaaaaactagccgggtgtggtggtgggtgcctgtagtcccagctactcaggaggctgaggcagaagaatggcatgaatccggggggcggagcttgcgctgagccgagatcaagccactgcactccagcctgggcaacagagcgagactctgtctcaaaaaaaaaaaaaaaaaaaaaaaattggtcttatctgcttatattttcttatagactaccattcatcataatctttctgtttttttacttaattctaaactggtagctatttcaaatatttctgagcaattgagttatacaaattaacatacaagttagaggtttccattgtatacttcccagcaaaaaaagattttttttttttttctgtgaggagattgaaagaagaggttggttttctgtacgtatttaatatatttcattgattatcactttcttcccattctttggatgtcagagacctgttatttggcttaaaaatacattacagaaaacttcatttctttaaattaggatttcttaggtaagggccaggttagacccagccttttctgagttacttctcatgcattagaattcttaaaatggatgtttatatcctagtggccttgtcttatggttgccttttagagcaagtcagagggtggtggtttctctgtctgggtgatgcctgtgtagtcatttgatttagtctggagtgggacttttctgtcgagggccagatagtgaatattttcagctttgtggatcatatcttctgcagctacttagctctgcagttgtagtgcacaggcggccatagacaatatgtaaaggaattaatgtggctatgttccaataaaactttagttacaaacacaggtgatgggctggatttggcccgtgggccagttgccaacccctagtgtaggtggtctgttttggtagtttcttcgagaaataatgtgttgtgcttgtaggtactgatgcttatagatgccagctttgggtttgaaatggaaatgtttgagtttctaaacatctgtcaagcacatggctttcctaaaattctgggagttctcacccacctcgactccttcaagcataacaagcaactgaagaagacaaagaagcgattaaaacacaggttctggacagaagtttaccaggtaggaagagaaataattgttagacactaacagtataatcctttaaaaccagactaaagaggccaggcacagtggctcatgcctgtaatcccagcactttgggaggcagagtcaggtggatcacttgaggccaggagtttcgagctcagggcaatatggccaaaccctgtctctactcaaaaggcaaaaattagtcgggtgtggtggcatgcacctgtaatcccagctactagggaggctgagacgtgagaattgctcaaagctgggaggcagagggtggagtgagctgagagtgcaccactgcactccagcctgggtgacagagtgagactccatctcaaacaaacaaacaaacaaacaaacaaacaaaaagactgaagagacattactaaacatctctctaggaattgcctcctgaattccctttgtgtatgtgttcccagtctctggaaggtgtccctcaagagagtggttattctgggcctcttggtgtatctcatttgtctccgtacctgctgcaccaggcaatgtctgggtgttttggagtcgggacttaatagagtacatcagaagtttctcccagttacaggaccaggcactgccccttcctttccatactgctgtggtccatcggccacagaaccgtttctgtgctcagaggcctcacctccctctcctcaccatacttagacagatgcaccggcttggttgcagagcagtctgcctctgtgtggttctaataagtcctgaaagaatccagcaaggctctggaagcctcaggacagtggctttgctggaagtctcccttcttaggattgcttcttgtttagagcttttattttgttgcagtattgacgagaatttaattgaaatttaatttttaattttcctttaatgtttaggttgccaaactgttctacctttctggaatggtgcatggagaatatcaaaaccaagaaatccacaatctgggccattttattacagttatgaagtttaggcctctcatggcaaacttttcacccttatatcctggcagacaggtaaaaagtgattgtaaactttttcttcctgggccatgtatttcaaagctaaaaaggctagaaaaagaacagtgataggatttattttgtgcctatttgaatagtgggggtagaagtgcagttgatggaaaatgtctacttatatcattgctcaaagatgctgtgcctttgggagtaaattaattatgagatgtttaggaaaatgggaggacttggaagcatttaaggctacaggatgtggccccatcctacgttcagcctcggttttcagtgatgctgccttcgtgcccgggtgctggagtccttcgtgcgtgccttcagtttccttcctttgtgctcttctttgtgctgtgattttctcagcctggaataccccttttccacctgccagaatccaagccacagtacaaatcccagagcacaggctcaccctcttccagaaacggattttctgcatatgttcttcactcttccctgaccccaggtagacgtcgtctcccatctggtgtcttatggaatgaatgtcactttcagcctagagacacagttgtgtgcctgccccttttcctctgctggatggtgaacggtgcttccttatttctgcattttctagttcctaagtgatgtgcttagtggacaagagtgtgatgagtcattgacacatgaaaggaggtataggaactttggcattcgtttctgctgtatgattgagtttatttttctaggatggaagatttgacaaacccggaggatatccaaacaaacatcaaatgtgaccggcaggtgtcactttatggttatttaagaggagcacacttcaaagataaaagccaaattcacatgccaggtattctcttgttgtagaacatactagaattgcacataggattcttgggatggcttcatttctcaggaaaaatgaaaaatgaccaaacaagggaagatggccttgctggaggttttaaaagtaagccagctatgtgtaggcctgcaaaggtgttaccgaatccctcttctctgacctcttgtagctagagggccactgttccagtgtggcacaatgcccttctttagggtcatgggttaagcccttggactgtggatcgtttttaaccccccagtcaacagtagatacttactgacttcttgtcagttgaagctggctttttgggtcccgtcttccaggggtagaacattttgccatgagtgacatcggtttcctcccagacccttgtgttcttcctgaataacaaaagaagtgctgtttaaataagaaggagcagctggtttatgtgcctgtttctggagttgagggtgtgctgtatgacaaagacgctgtctgtgttgaccttggtggcagccacggttttcaggcatcagtgaggcaggagtctttgctctgaactctcattattctttcctaatctattttttaatcaaaaaaagtaatgtactcagcttttatttattgaagatttttctcttgtacttataataaaggcccaaatgcatattgtcaatatgtagaataaaaagaataccattttttcattgtaccaagcagaagagtcctgtcctccatgcctccttgatccatggccccagcgcgggcactgctgccagtgtggcacctgcacggcttatttctgtttctacaaaatcagtgtgctttccagctctcgtttgtctttttctttttctcaatcacagtggtctcctcattattttaaagtggatttccaatatttatttcttagttctgtagttgaattttattgggttaaaagcagggttatttaaaaatgttagaaaagctagcactgttgtagcactggaactgaggtttttctagctaggtgtttaggttatcaggttatatactcactgagctttggacaagtttaatggagatggggatccatttcaagctttgttataaggattttcttctctggtgtttgtggcattaagaaaagatctcaggaaatgtgtctaagataattttgagaaactgagtgaaaccagtgtctctccaggatctttgtgctttcctcacgtgccctttcttggtggccttgataggacaaggtggggctcacccatgagctggtccagagtctcatctccacctactccaccattgatgccaagatggcttcaagtcgagtgacgctgctttccaattccaaaccacttgggtcagaggctatagataatcaagggtaagtctgctttttttctatttttaataaaaagatatattacagaagattgtatcacccataattctgccatcataacacattttggtgggattcattctatgtcgttttgtttttctttgtgtgtgcatgtgtctctgagggctcttcacttacctgacattacaagggagtcttatcttgaaaaaaaatacaggatgcatttttcaacagacttcaaatattcctcaaataccacgccatcttccataggttgcttttttggtttttcagagacctgaggccacttggctttcttttgatggccgaaacactagagcagagtcagggagtttgtggctgtccagaagccacatgccttgtctctgaaagttttatttagattatgttgtattatctcccatgggtaggtttccactaatgtgtggcttatgtgaattatttttcagtctgggttgggaatttgtatacctttatgcttagtggatgtttgcaaaacattgattttgttgtattgatttatgactcccagtaaaatttatctgaaaatcttgagataatgtagtatataatttgttacaatgtgcataaactacctaccacagtgcctgacgtaatgagtgttattagctgttttcatttttgcatatccttctagtcatccttgtctacaagaatactctcttctaatatagctacaggtaaaatacataattttatttctatattctgaggattttttttctatacagtctttatgtaatcatgattttattgttaccagtgtttttttgttattgtggtttctttgtttttgtttttgtttttgtttttgttttgagataaggtctcactttgtctcccaggctggagtgcagtggtgtgatcttggctcactgcagccttgaactcccaggctcaagtgatcctcctgcttcagccccgcaagtagctaggactacaggagtgcaccaccactcccggctaattttttttgttctgttctagggacgagttctcactatgttgcctaggctggtctcgaactcctgggctcaagcaatcctcccgacttggcctcccaaaatcctgggattacatatgtgagccactatgcctggcctgttattcctgtattctaacttatccatcccttatggtatgatttttagttttttctaatttatgttttcatacttttatctattgtgctacgttaaaaagcttcatatagttttctttcatccagtgattttagccccctgataatcttctctatcagttatggcactggtgactcaaaatggatgttattcctctgtcattccttctaagtttgttacctggcatttttaacaaagagctttctcttctcccctttgtttcagcatcacggctgactaatgcacttgcgttttattccatgggttattttccatcactgtcattgtactttctgatgcctatgctgtcccagattcggctgcgggagccttcggcctgtctcctgtgtcccttcaactgtctctgttagtctttgagcatttcttactttctgacagaaccagaggatccaggctcattttgtcctcttcctgccttgggcctggactcagccatttctcttaaggatcatgcgtttttagcttagaaattaatcagctttccagaagatctataaaaccctaacttcccttttgagcaatttttttctaaaattagattttttttttaagggttattcctttattctctctataagttcttttgaagtgtggtgttagggaaccatgcctcagtttccttattaactcttccggtgtttatcagatcattttttccctacgctatgtcatcttaaacatcttaagcaattcattgacattttctgtttcttttgtattttcattgactatatttccagttctagattagctgattaatgtacaaattgaattattttgcatatccttggtgatataggctgttgatgccaaaggaggaaaaacaaatagacttgaaaactggtcgaatgcgtcagaaagccatttttggagatgattctgtgcgaacgtcttctctcctttcttgatctcttaatttttttttcttatccaaatatataccagctgattttgtctttctagaagatccaagatctttggtttagagatatattctcttaatgttaactggtattagaatactcttttctgtattttatttcgatgcattttaaaaatagaaatgattgtattttcttttaacttgtgaagtagagcatggcatacaaattttgtattctcattatttcaaaaaatttccttcttagtgtacaagttgtattcagcacataaagtccatccagctttgttgtagatgcagtgtgattattacatgttgataaggtgtgaattggagatgggatccaaaagtactgtacttattgtaatttttaagctaattgtagatttggtggtgaatattttactactgcaaaatgaaaacagcatttcatcagaagttgttttatggtctttcaggcattttattttatatctttgatgctttttgcccatgaagtatctcttttgtgtgtttgtgtgtatgtgtactgatttgctgtaaatttcacagtgctcattgtcagggatcatcagaatcaggcctaggcagagagctgagcagtactctcagtatgtctctgtgtcctggttgccgcatatctctgttgtttatttataaattggagagctctctgatgtgtaacaaaggttggatagatcagagacaattggaagacgaatcctctactctattgtcacctcttatttttctattcacacatgtcagatagagacatgcgtgttgtaaattattttgtcagaatgaaagcctggcagattaagtgatttcttctctttttgctgtacttgatatcgatctcttgttcatttcttgataatatgtttggttatttttgttttcattgcttttggtgtcagagatggctttggattccctgttctgtgtgctcctgtctggctcctgaacccagctggagaggtgtgtcaatcccaactggtgaagtactgagaggaagctacacaaaaggcagcaaggtgttaataagtgtacctctgacattttaaccacctctgacttttccatggaatggacaagtagtagtctctgtcagagcaatgttttaaaggaaaaaaagaaacttgaggtcgtaaactgtttattaatttatgctgttattttgtgtttactcaactcatttatattgacttgtaaattagtaatttatgaactactattcatcaattcattgcctacatgtcagcaaacaagttttcttcttaataaagaatccggtggctgggcacaatggttcacacctgtaatctcagcatgttgggagggcaaggcaggaggattccttgaggccaagagttcaagacccgcctgggcaacatagcaagatttcatctctacaaaaaaatgaaaatattggctgggcatggtggctcattcctatagttcaggctactcaggagcctgaggtaggaggatcacttgaacccaggagtttgaggctgcagtgagctatgatcctaacactgctctccagcctgggtgacacaccaagagaccacctcttcaaaaaaggaatctaggggcatcagtgtgtgcacacagcatggcttgtgaatgcggaagtgcctgtgtgcatagttgtgctcaagaatgtgttgatgattatatcttctcagcatgaaaaaaagttgttgttgtttttttttgagatggagtcttgctctgtcaccagactggagtgcagtagtgctatctcggctcactgcaacctctgcctcccgggttcaagtgattctcctgcctcagcctcctgagtagctgggactacaggcacacgtcaccactcctggctgattttttgtattttagtagatacggggtttcgccatgtgggccaggatggtcttgatcccctgacctcgtgattggcccacctaggcctcccaaaatgctgggattacaggtatgagccaccgtgcctggcctgaagttcacatttataaagatctctctacgtcttagatttgattcttcctttaaatatttttctcattgacatttgaaagcacctgaccttatataaaatgaagaattttcataactccataaaaggagaattatgacatcatctactatttctttctcttgtctcataaatctaaaccatcaacctgcttatttttgtatactgtcacactgtgtattccctgcattgaatgcctttctattgacattgtctgtaaaaattgtgggaagttttctgcaccctaaattttctgttatggggattagatatccagtatccatgtttttccaagtcttacatcagaaagggtaaatacagccctcacagcagcctgttgtttgtcctgcagttgtgtttccatcacattacacaaagcctctttgtcttcgtggttgtaccctgctaataagttttttttaaattatgtaatatgtgtatatacaaatacctatatgtatgtgtgtacacatacagctgatatctactgagattatgtatgcatgaactatagaattaacttgtaattttaagaaaataaattattttgtaaagataaatctcatgtttaagaaggggaattacaattgaatcatttagggatgcctcagcctaagcataatatggaaaaagccataaccaaaagtcattttagagtactgctaggttactcaacctatcatcacatttaattaaaatgtcagtttgaaccatggccagtcgattttcgttaatatgttatttaaatcaacttgtgaagtcttcattttagatatagaatttgtgttaatgaactggaaaataacattctattgcttggaagatgtgttaaagcctaaatatttatgactttgtaaaagaagaaaaccagctggtgatcagttggcattagtatataaggatgtactcatatttgataatagccatttttttctaacaagagtaagggagttgggaatgggaggcagagacagggacacagatatataaaaaattgtagacaaaactgtattgcgttctgagtatggttctgtgatccatggttcagtttgagaggttcctgtgtcccttatgagaagggacaggaaagccaggaggacaggagtatgtttgggcctgtgcctgtgcttccaccacagaagtcagcagctctacctttctcttttctcctctttatctaataattgtttcctcttcaaatttgggaaatgagcttaatcaaatatttgttgtgttttttgtttgtttttgaaatgtggcctcagtgtgtttgcccaggctgatcttaaactcctgggctcaagtgatcctccctctcagcgtcctgtgtagctgggactacaggcatgtgccaccacacccagctaagttaatgctaatgtgtagtttatctgattcagttttgaagggcggggtatatatagatagttatgttgtgtgtgtggtggtgggggtagtgtttatgtgtgtgtgtgtatatatatatttatatattactagtccattgctgctacaacaaactaccagtatgtcagggcataaaacaaatttattacactcccgtatgtcagagtgtgatgtggatctcactgggctaaaatctaggtggtggaaaggctaccttcatctctagaggctctaggggatcttttttctcgccttttccacattctggagtctgcctgcattttttggctttgggctcttctccactctcaccattagcaaccttgcatcccatgggcccttcttctatggccacatgtctctgtggctctttccttcccccttctcttccactgttaaggactcatgtgcttacttagtcctgaatggagacaccgtcatcatccacatgagcccactgtcctaatccatacaggctgctacaaggaaatgcattagaccaggtagcttataaataacagaactttgtttctcacagtcctggaggctgagaagtgcaagatcaaggtgccggcagtcttggtgtctggtgaaggcctgctttctcatagaggcttccttcttgctgtgtcttcgcatggtgagaggaacaaacaagctcccttgtgcctttaataaggtgctaatcccagtcatgagggcagagtctcccgtaaggcttaacctcctaatgccatcaccttgagggttaggattttaacacatgaacagtgacggaacacaacgttcattccatagcaccagggtagtctcctcatgtcaaggtctttacctgaatcacatgcatgatgtaccgttttcatgtaaggttctaggaatctgtggacatctttggggggccattattttgctgatcacatattacatattttttaatattctagactagtatgaaaacaatgccacttccattgctttatatacgtatctatatacacattgtctaatgctataattaaaaaaaagttgtagacacaaatatacccatttaaaaaaaaaattttttttgctattttacttcatactgccaactcctttttcctgaaactgcttcaactctggaattcttttttgctattagttttattttattgaaatattcatgaatgagcatacacttgtatatggatttaaaattcacagtaatgttctcatgagttcatctgtgaataacattttatagacaaaatgtctgcactaagacaagagaaagatctataattcctttgttctaaggtaccgccattcattgttattattttaaaataggagtgttgactgatgttaaaacacaaaatgggttcgggagtggtggctcccgcctgtaatcccaacactttgggagaccgaggtgggcggatcacctgaggtcaggagtttgagaacagcctggccaacatggtgaaaccctgtctctactaaaaatacaaaagttagctgggcatgtgttgcgcgcccatgatcttagctacccgggagactgagtccggagaatcgctggaacctgggaggcggaggctgcagtgagccgagatcataccagtgcactccagcctagatgacagagtgagactctgttcttcccccaaccccccaaaaaaacacaaaaagggataattggccgggcacagtggctcacgcctgtaatcccagcactttgggaggccgaggtggatggatcacctgagaccgggagtttgagaccagcctgaccaacatggaaaaaacccatctctactaaaaatacaaaaattagctgggcatggtggcacatgcctgtaatcccagctactcaggaggctgaggcaggagaattgcttgactctgggaggtggaggttgctgtgagccaagatcgcaccattgcactctagcctgggcaataacagcaaaactccgtctcaaaaaaaaaaaaaaaaaaattataactgggcagtggaattgaaaatgattttaaaaaatatccaaaatacctaaggaacttgtataaataaataggaaaaaaaaagagaaaaacatcaagaagcccacaaaaaagcagatttgtaaatgggcaatggattcgaatagacatttagccatagaaggcatccagttggtgaaaaggcatatggaaaggtgctcagcatcactgattatcaggaaaatgaaaatgaaaaccgccacgagtggtttagaccatagcggcatgcatgaaagttttcagacctccagttgttgggagtggctgaggagattggggagcttctgtctgagttggaagagtggagtctcaacaagaaccagcgtattctggacatgtgtgcgccctggagtgttcatggctggatgccttgtctacctgtgccttacagagtgacaccattgtggtgtggtcgatcagaggggcaggaggctttcagagggagtgggaagtggtggggcttggtttgtttgcccatggatgacagcaaaagtgagttggcttctcaagaacttttaccagtagcctgttttgctacaattctagacccagactggggtcccaaggcatcatagcccacagcttcttagcaagtgcatgttcagttggatcccccagctcagcctgggtcatccccacgttctgcctcttgggccatacatagctcagctctgtactgagccatcatcccatggtgagcaagaccccattcttggtcttcagtctctttccctgcagcatgcaatcaaggtggtggctggaaggggccaaggagccacatgtcacagtgccctgctgcctgaacaaggaccagaggcctgtggaacacatggctctcagatttctcccatttgatgactcatcagctgcccccacatggctttctagctcacagcagatctagccttctctgagcagtgaagatgggatgttttatggtcattttccctggtgtggagagcccaagtggagttcttcagcacaccctacaccatcccctcactaacacccccacctgtccagtcttacctgccttcatatcaaaagcactcagttaacccagagggcttcagccctgccctgcctgactttctaggaaacccctctctccacccaccctaatcagacactgtctgaaggttccccctcatcattttaaaaggaagagaaatttttctgacacagaggttctggtgaagtggccagctcccacatcacagggtgatggtggtttggactggaccaggatcagacagtgctgtcctggggctggccatctgataaggggctccagaaagggcagtgatggacccctgggaggctttctgctctcctgatcacaggtttttggtgagaggacctattggccactagggtgtctgcgggggtgtgtgtgtgtgtgtgtgtgtgtgtgtgtgtgtgtgtgatgtgtgtttacttggaatgacttctttcagcatgaagcccactgttttgctgaacgtatctcactgtttcctgaaactcagtacattcagctggcttaagggtcctggggcctcgctgtgtcatatttgcacaagcctagtgtctgtgcagactgtacactggagttcagttgtaagacccttttgatcccttattctgttcctgtaatagaaaagccatttcactcaatggaatagaaacccagatctaatggagagatgttctaatctgccatacactggggcagtggccagtgatttggactttgtggcacagatggaaatttccaggttctctaggtggtaggcagaggcctcactttttaagaaactcccccactccacccctgccaatgaggacattgcttagaggtatttctatcagtgttgagtagaagagatcatttcttggtgttgaatttcaggtaaggatgccagcttctgcatatcagggtggtgatgtttgggctgcgacaggtctagacagcagtctgaaagggggctcaaggaagtagctgtgaaaggcccctgggatgttttctgctcccctttctgcaaatcccctggagggagatcctgttagtcactacgggatgtgtgtgtgtgtgtgtgtgtgtgtgtgtgtgtgtgtgtgtgtgtgttcatcacttgttgcttggggtgggaagagacaacaacaacctacagaatccatagttctcagttcatctcccatcctagtccaatcatggcctaacatccttagctaccgatcgcagaggagactgcgcatttgtgttcatgtggccttggatgttggcagattcagattggtgccccaggcatctgtgctgtaactgcagtttcagcgggctcaggaccaggctaaagggcctccaagcttcctccagtttcctggtgcatgcatgtgcaatatgctcccctggcctgggtctttcctgccgcttcttgccagttgggtcagaactagcttattaaccagtttttcttctgagctttaatcgaactggctccaaccagttggaggcttgaaaagggctacgtgctagttatagatttttaaagatatattattattttagagtagttttgagtgtacagcaaaatggagtgcagagtccagagatctcatatgccctcaattcctgtatactctcgggtcactccaccaacaacctcctacaccagagccactttgaaacattagaaaatatatttgagcattcagaaatgtataaactaggcagccccagactgcaagcagctcagaggtcccacagagaggcttagggagggtgggggaagaattttatatggtgaatgtggaagaaaaagaaaatacttgattgggtgaagtggagcagtggcctcatttggaacattacagtggaaggtctctagttagatgttagttggtggtttctgattggttcttacatttccttttattatttacactgagtcaagttttggtttatttaaggaggaattgagtgcacggcagccacctcagcctcatggccacctgtttatttgattatttttaacagagaagatccttttaaaaatatctgttaccgtggctggagtgcagtgacgtgatcacggctcactgcagccacaaccttccagctcaggtgatcctcccacctcagtgctccccaccctgagtagctgggactacaggcatgtgccaccacaccaccatgctaggctaatggtttgtatttgtttgagagatgcagtttccctaagttgcttaggcttcttttgaactcttagactcaaataatctgcctgcattggtctccccaagtgctggaattacaggccatctaaatcttttatctcaggtttgccttgtgacaaaaggtggggtactttttctgacatgatgaggcagagaaaggtgaggtgggtgcatcctgtgcatatgattttctcaggtgatgggaatatggtgggctcttgcctaatgggatatattttctctttgaatgatttggcaagatatcagatgagagaagttgaataaatgttagaagaacatagaaaaaataggttatacacattgggtttctgaagaaatgatgtcattggagaaacaaaacttttattgatttctggaaacatttagggccaattttttgtgtaagtaatttgaatttatgatgatatctctgaccactttttgatattttttctggttcaggtgagtggtgtcattgagcaaacacaaagtcgggctcatccaaggatgagattttgccagagaaaggatgagcagcaagtcagggagcttaaggtaattatgagacagtgactatctaaaattgcttaggtagaaggagacagattggatttttgtgtgtttggtatttgggataagagggatgtgggtgtgtacttgagatgtgttgtttattttctctcttttttctttttttttttttgagagggagtctcactctgtcacccaggctggagtgctgtggcacagtcttggctcactgcaacctctgcctcccgggttcaagggattctcctgcctcagcctcccgagtagctgggattacaggcgcctgccaccacgcccggctaatttttgtgatttttttttagtggagacgagatttcactatgtaggcgaagctggtctcgaactcctgacctcagatgatccacccgcctcagcctcccaaagtgctgggattacaggcgtgagccaccgcgcctggcctgtttattctcttaagagagaaaatgaggggattaatggactgtagttctggacaaggtggaaaactcttaaagtggaagtactggggcaagtgctctgacagggtaggatggtgcagtcagtcccttcacccagaaatcagtagaatgttagcagttcagactcaaaccttgtgaaaaacaggtggtggaaaggaaatccctcacagcaactggcaccataatcaagacaatgtttacaggataaatggagttacctgctttcagccccaggtcgtagctattgtctgccctgctgatatgtgataataatttgtgatcctgttgtcttaaaatggggtcactcatctccagtagaattaagtccacagtgaagttgtccccccatccccaaagagataaacatatatgaatgaactcacgtgataacaactactgctgcctgggatcatgagagacctgaactgaactgataggaagtgaaaggtggctgagataatgagaatagacccatctgcagaggatcataaaaccagcaaagacaagatcttgtctaagatgccttcacaagctttgtccatgagaactcttaaggatttcaccagacctgttggctgctgctgtgatctctgcccaagaggagcctctgaccaacatccaaagggcttctggacccactggactcctctggaggtaccttggtctcccgatccatggctgtggttttttactccctttatcactgcctgtgtgtagaatgataattgcacaattgatagtgtgaagacctcttgataaatggtaaatctgagcatatgtatttggctgacatgtcattgtgaaacctcacagcttcagtcagtgtctctccaaggactaaacaatggaagactgtagaagatgctattcattaagatatcgcaagaatatggaagactattattcgcttctcatgggacaggacttttcagggcacctgaaaaaactcccatgaaaaatcacttttacaaaatgtcaagttatgatatccaagatgaaaccaatgagtcacaacattcacataatacactgtacaaccctgatctcttgactgtcatcaaatgtttcttacctctaaaccaaagtttcattttataatttaatttttctcattttttccattctcttagcttaagaaaagatcattacaaactttttgtaagtttttcatatatgcttgcaaagggtcgtaaaactttattgtgattattcttgctttaagctgaaacatccctaatctttctttagagattgtggcatagcatgttagtttcttttccatatccaattgttgtctgtaatgaatacagaaatacgggcactattttgtaactttaaatagacatcatctcaagtctacaagaattatccaaaatggtatttaatgacatttctaggtcttcagacactattaatgcagattgtagcctctaggtcctgaagattttactagatactggttactgaaactgagctttcttgaattctttttccttccactgtggtttcccgcatttcaacatatcacctatttttgtcctcaaaggttacttaaattttttccacagaattaaattaaatatgaatcatccctcctctgatttttgaaatgaccctttgcttcctatgataatgattcttctggtccgttttgtagttatatgttagagtttgtaaatagtcacacattttgcaactgcatgtaattttcttattattttttcctcttcctctaaaactgctgttatttcttttaactttttgtgggaaaaattaaacccatctttcactttgttgatatacttatttataattgaactccttgatttttgctcgaattgcttttcaagttacccacttttagggaagacattatttgggttttgtttagtgtatcaggctttttttagttagttgtatcaagaagtgtagacttttctatacataatatcctttttcccacagtatttttttttttttttttaagtctagccgggtgcagtggctcacgcctgtaatcccagactttgggaggccgagacaggcggatcacgaagtcaagagatggagaccatcctggctaacacgttgaaaccccatctttactaaaaatacaaaaaattagctggacatggtaacgggtgcctgtagtcccagctaatcaggaggctgaggcaggagaatggcatgaacccaggaggcagaggttgcagtgagccgagatcgtgccactgcactccagcctgggtgacagagcaagactccatctcaaaaaaaaaaaaaaacattctgttaaaataaaggtgatcaaaagatcttttcccaaacctttcctttaccagaaatagctctagtgtcacatggtcctttctcccttcttgcttttgtaggaatccaaagctaatctgtccctgatccggattgcacgcacctgtgccttttggggcccttctgcattagttcttccttctcttctaacctcaaaaatgtgttttttctattggctctttccctttaacatagaagtatactcacgcttttgttgaatcttgaaataaaagtcttcctttaccacatatctccctttaatactacatctctcttctcagccaaatacttgggaagagaagccctgagtttgtgtcattgttttctcacctccagttcactactttgcccactgcctgacatccagctcactcacacacacacacaagcccaatcactaagttgccatagctaatttgtagctttcctgccttcctggcaaaatttgactctgcattgggataatacatgtcgagtacctattgaacaggcactgtgctaggtgctactgttatagatatgaaaagaaggcatcatctcctttctaacaactcacaggagcagccattcctgattcatacatgtctcttgactcccagtgctcactttttcaagcttcacttaatgccgtgcaaatcaccctattctccaggtcttctttcttcccagttctccttactatacacaacttctcaaggcagtcacctccacacccatggcttcaattgctttctccattctctgagaacaatagaattttaaatggttttatttcatgtattagctttattttatacaaggtgcctcacctgctgtaaccatagattcaaagttgctccatgaaagtaataaatgaaaaatggtgattttttagcatgtaaattttaggaaatttccccagttacgcttaatggcttgatttagtgtgtatgttatttttgaaaacatatgttgggatgtcacaaatggacttagcctacagagatttatattcaacttttgaccagagagttccattttaatgtgacactgagagtaaaaaactatcttttcctccttacctatttctcttcctacattctcggccaggaggaaggcactgctacatacccagtcttccccagcagagcctgagcagctctgttttccttctacttcccctcttctttcacatctcatgaccaagcacttcctattctgtctcccaaatgatcacagactttttcctccacttttgtcactgccactgcccttagcattactctgcctttagagaaagtctcttaattggtttggttgcttccttcagtctttattatacagaccactacacgcacatctgacagagacttttcacctttttatggttgaatgactgaaattcccagaataaaattaaaaccaccccagcatcaaatttgaggtcaaatagaggtgggtttgtatcccaggttcatatactgtccagcagtatggtctcagaaaactgacctccttaagcctttgtttgtgtatctgcctaaactcattgagagttgggactatttcacacatacagtgcctggcatgtagaagggacttaatgttgaaagaaggggaggcattttaaaatccacatcaaaaaaatgttgttctgtttgggagtggtggctcacgcctgcaatcccagcactttgggaggccaaggcaggtggatcacctgaggtcaggagttcgagatcaacctgagcaacatggtgaaaccccatctctactaaaaatacaaacattagctgagcatgggggcgggatcctgtaatcccagctacttgggaggcttaggcacttgaatgagaatcacttggacccaggaggtggaggttgcagtgagcaatgattgtgccactacctgggcaacagagtgagactctgtctcaaaaaaaaaaaaaataaaaagtaaaaaaaattcttttaaaaatatacgaatctggctgggcacgatggctcattcctgtagtcctagcactttgggaggctgaggtgggcctgatcaacatggagaaaccccgtctctactaaaaatacaaaattagctgggcatggtgacgcatgcctgcaatcccagctactcgggaggctgaggcaggagaatcgcttgagcccgggaggcggaggttgcagtgagccaagatcacgccattgcagtccagcctgggcaacaagaacgaaactccgtctcaaaaaaaaaaaaaaaaaaatagtgttcagcaaggttgaagcataaaaggttaatagccagaatcatttatcaattgtatttctatacatctacaagacacaatctgaaaatgaaattagagaaacaatttcactgggcaacaagagcaaaacttcgtctcaaaataataataataataataatctacaatgtcatttcccatccaagcttgacttctacctttactttctgatatggttttgccatgtccccacccaaatatcatcatgaattataatccccataatcccgatgtgtcgagggaggggcctagggggaggtgattggatcacaggggcagttatcctcatgctgttcttgtgatattcagtaagtcctcatgagatcttatagggttttgttttgttttgtttcttgggatggagtcctgctctgttgtccaggcaggagtgccatggcacgatcttggctcactgcagtctctgcctcttgagttccagtgattctcctgcctcagcctcctgagtagctgggattacaggcatgcacaaccacacccagctaatttttgtatttttagtagagacaggatttcactacattagctaggctggtctcaaactcctgacctcagttgatccacctgccttggcctcccaaagtactagggttacaagtgtgagccaccgtgcccagctgagatctgatggttttatacatgtttgacagttgctccttcacatgttcccactctctgtgcggccaccatgtaagtcggacctgcccttctgccatgattgtaagtttcctgaaggacttccccctctgccatgattgtaagtttcctgaggcctccccagccatgtgaaactgagtcaattaagcctctttcctttaaaaattacccaacctcaggtgtttctttatatcagtgtgaaaacagactgctatactttctgataatcatgcttaagcaattggggaattcagactacctgggatcaaactatggccccacccttagcagtcatgtgaccttgggggggtttacttaccttctctgtcccaacaacttctgtaaaatctgtaacatgagattgtttctgagggttaaatgagcatagcacagtggggacactgtcaggcacacactacttgccagatgtcgagtattcatctttattgaaataggactgtggtaagccactttatggctctcgattttgtatgagaaaatcatgtttagtgccttgttagtaaaagaaagaaaatctgaaagtccctgccatggaaggaagaaatagcggggagaaaagggagttggtaagtttcagcatttcagagcttggagggacaagttaggtttctattttatggagaaggaggtggaggcaggatgggtcctaaggtgtcattcaaaacacacagccataactctttattgagagtagagctagggccccagggattgctgtgatcaagttgcggacaaaaatgaccactcgttggaagacaggagaggagtgtttagttacaaaagcagtcaacaattcaggtgtatctatattcagacagcaaataaaagttgttcaacttggttgctaatgggacccactctactgaggctttgtgtagaactcgtagaggaagctggcttcgaggaatgaactaccctgtgcttttcttaggactaaaatctcaggaagctggtgatgaatgaaaaccttagtcccattggcactgcacgaggggccaggagagcagcagcatcataagccacagggtggggcagccaaggcaggggcattctgagctgttggggaggggtggcaggcagggtggggcactgtgaggtgtcggggagggcattgtgaagtgtggggtggggcattgtgtgccacatgcctgggctcccacctggggccagtgggcttcagtctgtaggtgactacagaaggaggaggagctccgtctgttctctcttcaggcagttgttgtgtctctcagcgcttgttgggttcacaacctattaaataagccggctggtcttcaccctcccagacaagtcaactcaggggaggcagcagggtgcgggccttggcccgcagccctagccggggccggggccggggccggggccagggctggtgcccggggccgcactgtgaggtgggcaggcgaggagcgggaagaccatctctgcaagtgcagcatagcctcggcctaggacagcgggagtgcgtggccaaagctgtgagcagaggcacaggtggtggcagacagtagaggcgccccatggggaacatactgacctgtcgtgtgcaccctagcgtcagcctcgagtttgaccagcagcaggggtcggtgtgtccctctgaatctgagatctatgaggcaggagctgaggacaggatggcaggagcgcccatggctgctgctgtacagcctgctgaggtgactgttgaagttggtgaggacctccacatgcaccaggttcgtgaccgggagatgcctgaaggtaaggaggtgataggtgccatctaccctcggtttgcctctggctgctgctgtccccaaggttccctttgaggcatcccacacttcgagctcctttctgcttgtagccagctttcccgggggctggccaggaacaaaagctggctctgccttgaattcccaccccttagtctttccccaccgagtccagtcagtttcttttcacctcccctcccaatcgcccagttcttgctctctcatctcattctcccaggctggcatgggaccatttatttatggctcttgtcgaataagcagcagttgaataaatgagttgataaatttttataaatgattacgtcctttttcttttctccctctatacatatagctttggagtttaacctttctgccaatccagaggcaagcacaatattccagaggaactctcaaacagatggtgagacaacagtgtctgtagctctgtttattatcctgtgggactttgtttaggcttctttgagctattctcttccttttctcaataaaaactcaaatatcccaacttttcagtacccatcttaatttttctttgaacctatccagatggtacctaagtgaaggaaccaggtaagtgcctaattgtttcctttgttaaagtagccaaatctcaggacagttcctattcaaatatttggggatttcttatttaaaatcagaatggaggttgccacgggagaggctatatggtattcttaatgggctgctttaagtcaccttgatagaagctgcttagtttcttctaactgtaatttgaacacagaaggaaaaagaaaaaaggagagtgcttaaaataattgtgaaaggtataaaatgtcacagccggggctgcagaaaaatggttgtgtgtgtgtgtttggggtttctcaaaggagtttacctatgaggctctgattactttaaaattcttactttaacagaaaatgtgtctccagatttattctggtgacttaacagactttatttacctccttgttctaaaagagaggtggggattggttcacggtcaaaactttcaaaagacatgaaacgtcaacgtagacttttaatgtgtaatataaagattgcaggttaaaatgtcagacttccctgtaagagtgtttgttgccgtggctccccctttgtcccttcccctcctgacaatagcatcttgttcaaagataagaaagttacagttttggctgggcttggtggctcacgcctgtaatcccagcactttgggaggctgtggcaggcggatcacctgaggtcaggagttcgagaccagcctggccaacatggtgaaacgctgtctctactaaaaaagaaaatacaaaaattagctgggcgtagtggcgcatgactgtagttccagctactcacaaggctgaggcgggagaattgcttggacctgggaggtggaggttgcagtgagcagagatcacgccaatgcactccaggctgggtgacagagcgagactccgtctcacaaaaaaaaaaggaaagagttggagttttttagtctctacactgttggcagaggcaggggatgggagccggtagaaaacagaaaacaattagttggtttgcctctaaaattttgcaaagagatgaatctaagtaaaagtaattctgggtaataatatggttcttgaataaaaactgaaattttcaaaatagaaaacattgcatcataaacatattaaatccagttggcttattggtttcatttaaatgccagagatttcattactctagaggaaatgtcttatagctcttctatttaaactttggttgggctcttaatttttaaagaggtaggataattaagactcattatgagtgtgactttgtaacttggaagtactatcttcacatttcaagatatttaaggattgctttagaataaacaaatgcattgtgtgaattaattgattgtacctttatacacaaagcatgtaagtacttgtataaacttatactctgcttggtgatgtttggaaagcctgatggatgttacacaccagttagtagatgggtagtgttggatgagagcccaaaaatggctctttattgtcattctttaggattacaacacagtttatgtatgtctcacttggccctttccaatacaaataaggcctgtgtatgttctccctatgtattgctaatgaagaaatgaaaacttagagatatcacatgactatggaagacagctactcaagagaactaaggttctgtgtcctcagaatgaaatggaagtgacagatatgatgaatttactttttaaaaattttaaaaactctagaatacatcttatattttgcctataaaatagactgtcttttaaaacttactgccatcttgatttattttatgcaaagttgattttacacaactcaaagccaaaatttacctcttcttctttttttttttttttttttttttaaataaaggagggtgtcattgtgttactcatgctggcctcaacttcctgacctgggttcaagtgattttcccatctcagcctcctgagtagctgggactacaagcatgtgccatcttgcctggctctatcttatgtctatacattcatttcaatggataagaatcaaagtagagatagtgaaatagcctaaatgcagcagccgaataaacgagttgataaatttttatcaatgattgcatctctttttcttttcttcctctatgcatatagctttggagtttaactcttctgccaatccagaggcaagcacaatattccagaggaactctcaaacagatggtgagacaacattgttttttccgccaagagaaagaataaaagctcttgtttgatcaggttatagaaagtatttagaaaaactcatattggtttaaatttttcaccttttcacatgttcacttgtcttattttaatatgtgatatactttcctttagttgttatgatgttagtgaaaacgtgtaacctttttgtttatacattttgccatctttttatcaacacaattaatttgtcatgtgttggaggagtcatggatttctctttataattcttggatttatctttatttataattaatggatttatctttatttataatcccttttcccttgctccaaaaagtacactttaaagatgaatgatagaacttaggcttcagcttggttttcatttaaacaaattaaaaaacatagttgtttatcatcagggattgaatctgtgatttgggcctcctcttacacagtcctctgaccacattcatttaccacatccaagttcatgctactcaaaagttttaggttattaactttttcatttgatgtcatgtaaatttaaacatgccctactcctgcttatttccctaatgttatgttaaatcctcatttatttgccaacaagccatacacagccaagttttccagttgacttaaacagcaagaatacaagtgagggttctataatagtgtgcgaagtaatgcagcacagtaaaacacgggagtttgtaacctttgtttttatagtttgagtagactttgcccatcttgagtcagttatttctggttagaatttgtcttcattttttacattactataaagagatacctaaggctgggtaatttataacaaaaaagaggtttaattggctcaaagattttcaggctgtacaaacatggctttaacatctgcttctggtgagggcctcagcaaacttacaatcatgataaaaggcaaaggggaagcaggtggttccacacggtgaaagagagaggggaagggggaaggtaccacactcttttttttttttttttttgaaatggagtctcactctgttgcccagactggagtgcaatggcacaatcttggctcactacaacctccatctcccaggttcaagcaattctcctgcctcagcctcccgagtagttgggactataggtgggcaccataacacctggctaatttctgtatttttggtagagacagggtttcaccatgttagccaggctggtctgaaactcctgacctcaagtgatctacccgcttcagcctcccaaagtgctgggattacaggcttcagccaccgcacctggccagtaccacagccttttaaattaccataatgagaatttgcttattaccatggggatgggaccaagccattcataaggaatccactgccattacccaaatgcctcccactaggccctgtctccaacattaagggtcacatgttaacatgagacttggaggggcaacatatccaaaacatatcagaattgtatttcccagttccttccagagccatgggcttctcacacctagagagcatggaagcagtaaaagaaaagctattccatgtccctcactcttcggtggtaggaacttttgcctacaaggcccttccagcatcaaaggcagaggcagtgtaggaaacaaagcatggcccaagtccctcttggggcttttattattctggcctctttttagaggaaaaaaaatgattttttgagcttcagacaccatgtccaattaggtttgtatactcattttaacatcaaaatttaggccaggctctgtggcttacacctgtaatcccagctctttgggaggctgaggtgggtggatcacgaggttaggagatcaagaccatcctggctaacacagtgtaactctgtctctactaaaaatacaaaaaaaaattagctaggcatggtggcacgtgcctgtagtcccagctagtcaggaggctaaggctgaagaattggttgaacctgggaggtagaggttgcagtgagctgagatcccaccactgcactcgagcctaggtgacagagtgagactccatctcaaaaaaaaaaaaattaagatacgttactttccagttgtgtaaagaccgttttttaattttgatttgtttttagtgacatattagtagataaccactaagtgtggttcaagatgcttacagggattctgttgcatctagagataggtgtctggtcaggacgtagttcttagagctgttagctcttagagtctgataattaaagtaagctatgtgtaaatgcagaatgagagaatactaatggatcatggctcatatatgcaacagttaaactttttattagctaaatttttcatctggcctaatttttttacccttttcttttgtacatgaggattctttcatttgtatgtaatagaaacaaaaagtaaactaaatgaaaaactaagtttttagatttgacttatgaaattaatcatgccagataatttaaattataaattattgaaaattatttttttaaatggaattttgtctcattttacataggagtaatcagtaagatgttaacaactacttttattttatggtatttgtatcagaagtgaccagtttttttttttttttattcttagttgtagaaataagaagaagcaactgtacaaaccatgtaagtaaacactcaaatagttaagaaattgatagtttgacataaaaggatgtctctcttgatttctttaaattacaatgtggacctggtggtggtagcatggacctctttttgtggattttctaaatctcttctattttcctgagtattaaatttatccagaaaagtgtttagcttagcgtgtccaccttttaaagatttctgacatttaagttaaatttcaatagtctggttcaaaagatctgccttaaggctgggcatggtggctaacgtctgtaatcacagcactttaggaggccaaggcaggctgatcatctgaggtcaggagtttgagacaaccctgaccaacatggtgaaattctgtatctactaaaaatacaaaagtagccgggcgtgctggtgcatgcctgtaatctcagctagtcaggaggctgaggcagaagaatcacttgaacccaggaggcggaggttgcagtgagccaagatcgtgccattgcactccagcctgggcgacagagcgaaactctgtctcaaaaaaaaaaaaaaaaaaaaaagtgccttaaatatttaatcttatttttaatgaaagaacaaaaatagaatagttaagttaattgccagcactgtctattgactttctatcacagcgggtaaaagcgtatcttcctcgctacaccatgatcttatgtttctccctgtgtttcttccaattgtagcacactttttaattaaatcagtaatatttacatgattatgactctgcaaatattattcactgctaagtcatatggtgttttcactgtgcctctgcattccatgtccttcatcctgtctctgaaacagttctgaaatctgagcacttctgcaattctcctggatcttcttttttcctagcctatgttagtttatctatccaaatatcattaagtagcctctgggtgctctgtttgctttcacatccattattttttagcatgaagctaattttctgactatattcatttgcctattttctaatagctgtttttcccccaagtattgtagcatttatcacatgcctttcaaagatattttccatctgcaaaaacacatctgttcctttttatgtgtgtgtggggggcaactttctttggccttttgtcatcctagttcaatatagcgtgggtttccctagatatgctcaatgtctgcttttctgggctaactccttaaagtcttttgggatctcacgtaactgctgtcttgtgtgggatctcctgagtcctagattctgtgtttccttctgtcctgttatcgtctctagttgtacttgaacacattttcctgggtggagatgttaaaatccctcctctttgatagagagtacacctctaggttgaatctaaattgtatggttctgaagacattttgcagttgtgctcttattacagtgttgttcttgaatctattgccagtgtgtgatatgttatttacaaccaggttttagttatctgcggaagctttttagaatctctctctctaaggttctgaaattttataacagcttgttggggatcttttcattttattgaggctactaaacctgcagactatctcttcttgagaattttttttttattttctctgttacttttttactgatagtcttgttcttcagatgctaggctgcttagaccagtacacctgcattgatttttaatttttccccttctatttttttcagtttgtctttttattctagttctgggatattctgtgactttatcctctactatttctattgaattttatattttttgagagtgttttaagattttttttttaaagttttgctcctgattttgactggtcctatcaattccttttttctattgttttgatctcttttcttggaggcttccctccaatgtgtggtggtccctggcctgctttatttggaagcaggatttctgttaactgatagcactcagtgtgaggccttagaagcctgactagcttttcatttgggagacctcagtgtattatctggggatctttactgaagacatttcagtttcttctgagaaggatctcccaattttctgcctggaaagtaaaagcaggcctggaaaggaaaagcagagttagcaaagaaagttggagttccatttttggtgtacagttttctttatatctcaggtttaagccatagtatctctgagccagaaattctcaggtttgatatatccagagaacacacatctaagtttcttgtcagatggaaggacaggtagactttgggctctagttagagatttgcaactgaccttgctggctttttttttttacattttaccctactttccaaagtgccatttgcctgtaagttcacaacctgcctttagttctgcaagacaaactggctcgcttctgttccagtcactttctgtagtcagcaaagttgtgtttctgtgttatttaccactcctttgtctactttttatgtctcagcatttactaaaaattatctctgtcaaccttctgtgctggtcatgggtgtaacctttattttatgactaatgaggcttccagagggagacgaaataaatttgtggtcaatctattatatttaatccaaatttaggacctatgtttaaatcaaagtctaatttgagtataatgatattaagccagagaattttttaaattaatgtatctataataagcatattacacttttctcctaaggccttgtttaatattttcattcaaagtttatccactgccatatgcttcccattacttcacaacataaatggagctgttttcctgaatgcccaaggtgttagaaatatttaagttaattaagatttgttcatttttagcctggtcaacatagcaagacctcatgtctacaaaaaggttaaataacaaattagccaggcctcgtggcatgcgcctttcatattacctactcaggaggctgaggcagaggatcacctgagctcaggagtttgaggctgcagttaactataattgcaccactgcactccagcctgggcaacaaagggagaccctgtctcggaaaaaggaaaaaagttactaattctttaaaaacctatctaaaatttgtcctgcccaaaaggagagtgaaaaatatgaactttagtctttgttttattttatgtttgctgagaaaaatgctgtactttatttatttatttattatttccataggtttctgggggaacaggtggcatttggtgacatgactaagttctttagtgatgatttgtgagatttaggtgcacccatcacctgagcagtatccgctgaacccaatttgtagtcttttatccctcaccctcctcccagcctttcccccaagtccccaaagtccattgtatcattcttatggctttgcatcctcatagcttagctcccacgtaggaaagagaacatgatatttggttttccatgctgagttatttcacttagaataatagtcttacttccatccaggttgctgggaatgccatgaatttattccttattatggctgaggtggtattcctcatatatatatatataatatgtatgtatatcacagtttctttatccgctcattgactgatgggcatttgggctggttccatatttttgtaattgtaatttgtttgagttcctcatagattctggataatagccctttgtcagatgtatagactgcgaagatttcctcccactctgtggttgtctgtatactctgttgattgttccttttcctgtgcagaagctctttagttaagtctcacctatttgtttctgttgcatttgcttttgtgttcttggtcatgaagtctttgcccaagccagtgtctagacgggtttttccaatgttatcttctagaacttttatggtttcaggtcatagatttatgtccttgatccatcttgagttgatttttgtgtaaggtgagagttgaggatccagtttcattctcccgcatgtggcttgccaattatcccagcaccatttgttgaatagggtttactttcttcactttatgttttaggtggctttgttgaaaatcagttggctataggtatttgagtttatttctgggttctctattctattccattggtgtatgtgcctatttttatatcagtaccgtgctattttggcgactatggccttatagtatagtttgaaatcaggtaatgtcatgcctccagatttgttgtttttgcttagttttgttttggctgtgccggttcttgtttggtccatataaatttcaagactgttttttctagttctgtgaagaaggatggtggtattttgatgggagttgcattgaatttgtagattgcttttggcagtatggtcattttcacaatattcattctacccattcatgagcatgggtgtctttccatttgtctgtgtccatgacttcattcagcaatgttttgtagttcccaacggcatatcaaaaagataatcgggccaggcacggtggctcacacctgtaatcccagcactttgggaggctgaggcggacggatcatgaggtcaggagttcgagaccagcctggccaacatggtgaaaccccatctctactaaaaatacaaaagttagccgggcgtggtggcgctcacctgttatcccatctactcgggtggctgaggcaggagaatcgcttgaacctcggaggcagaggttgcagtgagccaagatcaccgcattgcatactccagcctgggcaacagagcaagactccatctcaaaaaataaaaaaaagataatccaccatgatcaaatgggtttcataccagggatgcggggatggattaacatacacaagtcaataaatgtgatacaccacataaacagaattaaaaacaaaaaatcacatgatcatcttaacagatgcagaaaaagcatttgacaaaatgcagcatccttttatgattaaaaccctcagcaaaatcagcatacaagggtcatagctcaatgtaataaaagccatctatgacaaacccacaaccaacataatactgaaagggggaaaagttgaaagcattccccccgagaactggaacaagacaaggatgcccactctcaccacttgtattcaacatactactggaaggcctagccagagcaatcacacaagagaaaacaataaaaggcatgcagatcagtaaagaggaagtcaaactgttgctgtttgatgatgatatgatcatatacctaggaaaccctaaagactcctccaaaaagctcctagaaccgataaatgaattcagcaaagtttcaggagacaaaattaatgtacacaaatcagtagctctgttataccccagaagcgaccaagcttagaatcaaaccaagaactcaaccccttttctgatagctgcaaaaataaactaaaataaaataaagtacttcggaatagacctaaccaaggaggtgaaagatgtctacaaggaaaacaactttagtatttttaatgggttaaaatgagaggcagcaggtacagcagaagtcagtgcgtgggcatccgcatccaatgggtactgcacctttgatggtaaggctttggttttgacttactaaattactaggtacgattattttctagtttttgtcattaaaccttaaaactactaagtaaccccttccatttcttgttaaatattgtaaaatttcatactctcatttatgctgactgacgttagattatttgtttctattttgtgactaccttaaataatacctataaagagtaaactgttagtagtgtttttgctgtaattaaatgtagtaagacttaccttccaaatgatgactgaattgtcaaacacttgtcgaagttttggatttactcaaaattctatgctcagcagctggaggtaggaagagtaagggccctcccttactcttatggagaggcatactttctcatgaggggaatactctgcaggaattagcatcttgtaagcagtggtgaattcaactaattagtgtataaaaatacattttttggtgtggctgccgacaaagagatccaagagggtagatggagtcgagcttgctgaagcaaggaaagagaaaagcagtattctaggcagagagcaggggtagagcaggaaaatggctaggtgcaggtcagatgatttatagaatgcaattgatcaagttttgaagtgaatgcaaagtattctccaagagtctcatttgagtcatgtcttggcagtcttatttaaacatgaagtgaaagttagattttttaagttgtcatttgtttttagggtgtgagagaatatttaagtgatactctttttatcctccacataagaaaataggactagagaaacctatggcttcctcacttgttggtggcctagcagccctggcacacagagcccctgaatctgaaacacttcttttgtaacaatatcacctgaaataatacgtttaggattagtaatttagtaaatgcattagtcttgtattcactgcaataaagtgctcttgtagcaggattatttaatacactacattttatcgtagtaaataaataatagaaggactgggcgccgtggctcacgcctgtaatcccagtactttgggaggctgaggcaggcagatcacgaggtgaggagatcgagaccatcctggctaacacggtgaaaccccgtctctactaaaaatacaaaaagttagccgggcatggtggtgggcgcctgtagtcccagctactcaggaggctgagtcaggagaatggcgtgaacccgggaggcggagcttgcagtgagccgagatcgcgccactgcactccagcctgggctacagagcgagactccgtctcaaaaataaataaataaataaataaattaattaattaattaattaatagaaattcttggctgctttttattgctgtagaaaaaaatatgaaatctcattttaaacttttctttctttttttttttttttttttgagacggagtctcactttgtctcccggcctggagtgcagtggcgcgaactcggctcactgcaagctctgcctcctgggttcgccccattctcctgtttcagcctctcgagtagctgggactacaggggcctgctaccacgcccggctaattttttgtatttttagtagagacggggtttcaccatgttagccaggatggtctcgatctcttgacctcgtgatctgcccgcctccacctcccaaagtgctaggattacaggtgtgagccaccgcgcccggcgaagccgacttttcccattatttttaacggtaattcataaaatccttgttaggtttgatgacaggtaccatattaagggcagcattttataacccatatcttaaacatcatctctggaagttgagagcctccaatgggttttctatagattgcacatgataccacactcaggcagttcatggagtgtaagacatatcttagtgctttgtcatttgacattttaactgagaaaaaaatacactttgataagtttgacttacacttcccttccccttcaggtatctactgagcgtttcagtcaacaatacagctcgtgttcgacaatattccttgatgacagcacagccatccagcattatcttacaatgacaataatatcgtgagtacaactatgctgccgagggacagattcctttattcggaaattatttcagccatttggttgtcctcttcagcaatcagcttaagaaattggagtcaaccatatattgatattcagattctgaatattaagtatcagtttctcttttaatcttagacgtcgtggtggaaggaaaaatcagttagcaaagaagcaaacccagaaacagtgtgtctttttgatgtctttatgcctttagacaatgttgaacacagtgagaaggataggttccctttattgaatgttttttgtggaaacttagtttttcaatgcatcataggcccaaatcagtgtgcactactttggacattatccttggaagaaggaacagcttttcttcttctggcaccacagtgtatctgcatttgaatttctcccattgtgcatgagcacctcgtgggccacaaagatgcgctttgagagcaccctgagatgaagtttattttaaaaggaacaacaaccaacaccaccaccagctccacaggggccgtccagtgtacattattctcatctccttgggttattagtcttgatttttagaacacagtttggaaagtgctaatttagaatattaatgtctttatctttaatttaacttttcattctgtaaacataactagcttataaacaattttgtttcaaatgcactagcctttttagctaattcaattgtcaataacttttacttcaattaaaagtggcaagtttacactcataataatgtcactttcctccctcccttttaacaatagttgagaggaaattgtgtttcaaacaaaaactgaactcaaactctgtctcaagtcctgagctttgggacctattgagtaatcactaaatgtctgtagtcagccaagtctcttaaatctttgagcacacatacacaaaaattactttgactagagtccctggcttcttctgagttccaaagattttgataagttagcatataattcaaaagcagctttgaagattaattttgctgaaactaattttgtgcttttttcctcattattctactttttagaagtctacttttgagagtatagtaagttttaatttgccaccagcaagtttgagaaataatcatttggtgtattcactattggtgaaataaagttattgaacaaattaatagggcaaattggcttcaagaagatatattgaaaaatgttttatcatgaatcagtagtgcactgttgtcagtgggataggtggaactcgctgagatcacttatgcaaggtttttttcaaaatgcaagtctgcaaatacatgtatcttcccatctccactttccctctatctctaggcactgagaagccttttaggaaaatcgggatggatgtgaggcatctttctgtgaagaaaagcatcccagaagattctgattttcaccccagctcaatcattccaaactttgctgctgattgaaatcacctgggaaacgtttaccaagaaccttgatgcccaaagccatacccaatactaattaaattaaaatgtctcatgtggaagatgaggcagatattaaagcttctcaggcgattttaatgtgcagcaaagtttgagagccactgcttaatttgagtttaggacgagaaactgctcctatttggtgggaccttgggcaagtcagttttaaggtttgtttccctgatctgtaaaacaagtgttgaattaaatgtcacataaggtcattggtcctttccagcatgtaactttaaattctgtgattttaaaattatttcagagatgaaaactacttgaagcactatagacatatccatctcacatgctaatgttacaggctttttaaaaagtgctaatattgtgtagacctattagtagaattgagatttaccttccctcagttgttttgagcctcactctacaaaattagctgggtgtggtggtacatgcctgtaatcccagccacttgggaggctgaggcaggagaatctcttgaacccgggaggcagaggttgtggtgagccgagatcacaccattgcactccagcctgggcaacaagagcgaaactccacccaccacccccccaaaaaaaaaattatctgggcatagtggcgcaaacttgtagtcccagcttcttgggaggctgaggcgtgagaatcgcttgaacctgggtggtggaggttgtgaggagtcaagatggcaccactgcagtccagtctgagcaagagagacagactctgggtcaaaaaataaataaatacataaaataaatcgcatgggacgaaaggtttcatcggtagaaaagcatataaaagggaaatctgttattatttatatattgtaatcaccaacagaaacgcgtcttctaacggcatatttccttgcattttggttctcatatttttgtaaaaaacaaagaaatgaaaacaaagtgcccttatggtactgttctgaactagaagatttgaatttcagggccgctaggagagtttcctctgccccccttttaaaaaatgtctgcaggcctaacaaatgataacatctattgttatgaatttgttttccttccacagtgtgaccttggagatacctcatcatatcacacaaaggtgagctttttagaaacctgtcttgttattctagctaattactttgcaagatatcaagctcagtgttaggtcacagctctagacatcataagctgtattgtgcctactaaaatatcgaagcaaattatttgtattttctttgttccttaagactctcataattcttaaatgattgagaatctcaaagagtatatgtttatattgattatattgatatttagtgtggtagaattatacaattgaaattttttcaaaatctatttttagtttagatttcacagccttaccactgttgatattatgggctagataatgctttgttgtgaggactgtcttgtgcattgcagagagtttagcagtattcatggcctctaccaactagatgtcagtagtaacccatgacccagtttataaaaacagaaaatattccttgagaacagtattgttaacagaagtttttcattgaaaaaaaacttttctacaacaaaaagttgagtaaaaagtgtgtcatttgtttatattatttaaagtctctcatgttgagcttaataggagacaaatggattctctagagctttctttgcaatttgcttcaaagaagcaatatgaggctgggcacagtggctcacgcctgtaatcccagcactttgggaggctgaggcgggcggatcacaaggtcaggagatcgagaccatcctggctaacacggcgaaaccccgtctctactaaaaatacaaaaacttagctgggcatggtggcacgcacctgtagtcccacgtattctggaggctgaggcaggagaaccgcttgaacttgggaggcggaggttgcagagagctgagatcgtgccattgcactgcagcctgggtgacagagcaagactctgtctaaacaaacaaacaaaaaaagcaataagctggtggggcgcagtggttcacacctgtaatcccagcattttgggaggccaaggtgggtggatcacttgaggtcaggagtttgagaccagcccgaccaacatggtaaaacccgcctctactgaaagtacaaaaaatggctgggcgtggtggtgcatgcctgtagtcccagttacttgggaggctgaggcaggagaatcacttgagcctgggaggtggaggttgcagtgagccgagatcttgccattgcaccccagcctgggtgacagagagagactctgtctcaaaaaaagagaaaaagaagcaataagatgacctaacctcatgcaaatatgtagttggtagaaggtgtatttttaaagttttcagacagttgtgggtatttgttaaaacactaaatcaaaacttcacaagtggtggtttcttaaattagttacggtggcattttacatattaataaatttattccatcagtactcattgatctttcttgcacagtaaatggatcttttgctccatacttgcatttataatatcatgcattagttacttggaatatattggtttatgttttattgtgtcaaaaatcacttttagtttaaccaccaatcttactttaacaggcctttaagtattgaaaagctgccaagcctacagtagaaggaacaagtttttcaaagtccacaggaaagcttaaattttatcattgggaacaaatacgtatttcccttgaagtgacaacctctcacttcatttatttttgagaatgatagttgaactggttttttagaccgagtttcactctgtcacttggctggagtgcattggcatgatctcagctcaagcaatcctctcacctcaggctcctgtgtagctgggaccacagatgtgtggcaccacgccaggctaattttcttatatgtttgatagagacacggtttcgttatgttgcctaggctggtcccgaactcctgaaggagctcaggccatctgcctgctttggcctctcaaagtgctgggattttacaggcgtgagccactgcgctggcccagttgtacttttaaataaaaatgatgttctgtgaaaaaagtgatttttcagttcacagttaaatcacggattctttaaaaacaaaaaaaaagcacttctcattaactttccacttattcagaatattagagacatgtcaagatttaacaacattaatttttattgcttcatcaaagacgttcttaagaaattcaggctatgttttttacctgtaggggacagtgaagaatagaatgactactaatgtaattggtaccactgccttgatttatgctgagaaaccagccattgtacctacttttgcttttatacaatcatggcaagtgtcaacgaaaaagcaggcaatgactttgtattactttcacaaatttttaaaatttttcatcagctttctcaggtttaattagtatgattcagaacagtgttggccaggcacagtggctcaggcctgtaatcccagcactttgggaggccgaggcaagtggatcgcctgaggttaggagttcaagaccagcctggccaacatggtgaaaccacatctctactaaaaatacaaaacttagccaggagtggtggcaggtgcctgtaatccctgctacttgggaggctggggtaggagaatcacttgaacctgggaggcgaaggttgccatgagccgagatcgcaccattgcactccagcctgggcaacaagagtaaaacttggtctcaaaaaaaaaaaaaaaaaaaaaaaaaaagaacagttatgacctcttaggccttctggaaggggtcttcgggatcccgagaggtccacagagcacatttggagaaccactggtttatacacaggcacaatgcattagttttacaaagtttaaagttcctcaaagactggcctcttaaaaaggtagatgagtttgtcattcagacaacagaaaatacataaaaacatcatgagagtatactacagagaactaaagagaaaggaagctaagaaatctgaatcacatttacatttattaaagtttactactactgctttgtagaacattcttgtgtttcaatgtgtggttagaagagtgaaaatatgtttggtttattgccatggcctgttagggagagtcaatactcatgggcatttctgactggttatcatataaaaggcttcacggtacagaccatgatgtgctgagaaagaagaagtcaggaaaccctctgcaagtcaggatccaggagaagaatttgtaaaaactgctttggtaaagtaaacaccaaagcacacaggaggaagtattttactcaacaaatattatactaagatattaacagtttttgaagtaatgcactttcttattttatagagatgcagatagatctttgagcatacctgatgaacagttacactcatttgcggtaagtggcacttttattgaggttgtattttcatcgtacacttgtatctgtttcatgctgaagtcaaagccatctttttttaaatcttccccatttcatgttgcatttagtcatcttaagtgttgtaaaaagaatgtgctggagtaagaactgatctgcagctctgtttagttagtgagctagtgtgagtaaatatactatccaaacaacagaaaatgtatctttttttttttttttttttttttttttttgatggactctctttctgtagcccaggctggagtgcaatcgcgcgatcttggctcactgcaggctctgcctcccaggtccctgttcaagcaattctcctgcctcagcctcccgagtaactggaattacaggcatgtgccaccatgcccagctaatttttttttcttttttttttttttgtaaagacagggtttcaccatgttggccaggatggtcttgaactcctgacctcgtgatccacccaccttggcctcccaaagtgctgtgattacaggtgtgagccaccatgcctggcccagaaaatgtatctttttaaaaggtaattgtgagctgtctataggatcctgcaagccactacccaatttttgaagccattcctcctcctgttccacacaggtttccaccgtgcacattatgaagaaaagaaatggaggtgggagtttaaataactattcctcctccattccaccgactcccagcaccagccaggaggaccctcagttcagtgttcctcccactgccaacacacccacccccgtttgcaagcggtccatgcgctggtccaacctgtttacatctgagaaagggagtgacccagacaaagagaggaaagccccggagaatcatgctgacaccatcgggagcggcagagccatccccattaaacagggcatgctcttaaagcgaagtggaaaatggctgaagacatggaaaaagaaatacgtcaccctgtgttccaatggcgtgctcacctattattcaagcttaggtgattatatgaagaatattcataaaaaagagattgaccttcggacatctaccatcaaagtcccaggaaagtggccatccctagccacatcagcctgtgcacccatctccagctctaaaagcaatggcctatccaaggacatggacaccgggctgggtgactccatatgcttcagccccggtatctccagcaccaccagccccaagctcaacccgcccccctctcctcatgccaataaaaagaaacacctaaagaagaaaagcaccaacaactttatgattgtgtctgccactggccaaacgtggcactttgaagccacgacgtatgaggagcgggatgcctgggtccaagccatccagagccagatcctggccagcctgcagtcatgcaagagcagtaaaagcaagtcccagctgaccagccagagtgaggccatggccctgcagtcgatccaaaacatgcgtgggaacgcccactgtgtggactgtgagacccagaatcctaagtgggccagtttgaacttgggagtcctcatgtgtattgaatgctcaggtatccaccgcagttttggcacccgcctttcccgtgtgcgatctctggagctggatgactggccagttgagctcaggaaggttatgtcatctattggcaatgagctagccaacagcatctgggaagggagcagccaggggcagacaaaaccctcaataaagtccacgagggaagagaaggaatggtggatccgttccaaatatgaggagaagctctttctggccccactaccctgcactgagctgtccctgggccagcagctgctgcgggccaccactgatgaggacctgcagacagccatcctgctgctggcacatggctcccgtgaggaggtgaacgagacctgtggggagggagacggctgcacggcactccatctggcctgccgcaaggggaatgtggtcctggagcagctcctgacggggtggacgtcatggcccgagatgcccacgggaacacagcgctgacctacgcccggcaggcctccagccaggagtgcatcaacgtgcttctgcagtacggctgccccgacgagtgcgtgtagtatctgttttatttgactgcagtctccttggtgcaaaaacaaaatgggaaaaataaggataactcagaatttcaaaaggaaatcacaaattcagctagtaatagcattttcagtacttttcgtaaactaagtaaatacacaaaatgttgatttttctgaccataagacatattttatgtccttttgccaaggtggatgtgttagtctcaggccctcctggccacattgcccaagtcacacaggcttctgtattatgtatttagataaaatgtgtgaaaatatatttgaaaaaaaatttcataaatgtgcattgatttttgtacacatggcacctctttttcatttttatttttatttttatttttttggacgatgttttgctctgttgccccagctggagtgcagtggcatgatatctgctcactgcaagctctgcctcctggattcacaccattctcctgcctcagcctctcaggtagctgggactacaggtgcctgccaccacacctggctaattttttgtatttttagtagagacgtggtttcaccatgttagccaggatggtctcgaactcctgacctcgtgatccacctgcctcggcctcccaaagtgttgggattatgggggtgagccaccgtaccaggcccatggcacctctcttaatttataaattgaactggatgtgaagtaataatgtcagctagttgagataagagggttacagttaggctgggcgcagtggctcacacctgtaatcctagcactttgggaggcctaggcggactgatcaccaggtcaggagattgagaccatcctggctaacatcatgaaaccccatctctactaaaaaatacaaaaaattagctgggaatggccaggcgtggtggctcacacctgtaatcccagcactttgggaggccgaggcaggcggatcatgaggtcaggagatcaagaccatcctggctaacatggtgaaaccccatctctgctaaaaatacaaaaaaaaaaaaaaattagccaggtgtggtggcgggcacctgtagtcccagctactcgggaggctgaggcaggagaatggcgtgaacccaggaggcggagcttgcaatgagctgagattgcaccactgcactccagcctgggcgaccaagcgagactccatctcaaaaaaaaaaattagctgggcgtggtggcgggcacctgtagtcccagctacttgggaggctgaggcaggataatggcatgaactcaggaggcaaagcttgcagtgagcagagattgtgccactgcactctggcctgggcaacagagcaagactcggtctcaaaaaaaagaaaaagagggttacagatcattgcacatggaaaatattcccagcagtaaccacttccattaatgtgatctacagcttttaaaaaggagcatctcagaataagatggtggtacaatttgcttattgagaaaggaaaaaaaaaaacacatgagtatattacaaagggaaaagaaggaatgtgatttctcatgattgaaagcttgatttagattgcatacagcttttgctacccaagaccaagaggctctggcaagacagggtggttttccgaatgccagactgaggtgccttatgaaggcagctgccgatggttccagatgtagagagataggtgatgcaggagggaaagctggattggaaaagggagagttttgtagacgggctacgctcattgtgcctttgaaagagcagagccggcagcctctagtcatcatttggatatacaggactagagcatgaatctgatgtagagctacagaatgaagagcaacagcagctgtttaaataccaagaaagtgtgtagaatgaaattggacaagccaagcatggtggtttcatgcctttagtcctagctacttcggaggctgaggtgggggaattacttgagctcagcagtttgagttcagcctgggccagatggtgagaccctgtatcttaagaaaagaaaaaataagaccaggtgcagtatctcatgcctgtaatcccagcactttgggaggccaagttgagaggactgctcgagtgtaggacttcaagaccagactgggcaataaagtgagacccatttctaccaaaaaaaaatcaagaaattagctggacatggtggcacatgcctgtggcctcagttacatggcatggcaggctgaggcaggaagatcacttgagcccaggaggtggaggctgcagtgacccatattcatgccactgcactccagcctgggcaacagagtgagaccctctctcaaaaacagataaagtggacagaaaataggtcagtaaggactaatcatttaagggacaagcccccagaagagtggctactagagtgggaggaggaaaagcagaaggagaaagagttgaagataggcgaggctgtggtcccagtgctgaattctgccaagcagtgacttgattcatgaacactcactggatgctgactctgtttctcttctgagtgctggggtagaggagaggagaggtggagcacagttcttgcttttatgagcttatgttctaggaagttcaagtatttttttcaggtagtatgaaatagcaggaagaggaagcaggctaaagggacacagagtgattgggggctattttaagtagaatgataaggaagagcctgtctagagagctatttgaacagtgacctgactgaagggacaacagaaagcagtgctgacattacaggtagcaggatgactgccaagacagaaacgcatttcatatgtgtttgaggaacaaacagcaaggtgaccagcatggggagagtgaagaatgagggaaaccttgaatgagaataaagcaattccatcttggatgctaatctgccatattctgattaatcccagttccaacaattcatctacgatttctattttatctttttaaaaaaattattttttattttttattttttgagaccgagtctcactctgtctcccaggttggacttcagtggcacaatctcagctcactgcaaacttcacctcctgggctcaagcgattctcctgcctcagcttcccgagtaactgggattacaggcgcctgccaccacgcctggctaatttttgtatttttagtagagacgaggtgttaccatgttggccaggctggtctggaactcctgacctcaggtgatccgcccaccttggcctcccaaagagctgggattgcaggcgtgagccaccgtgtctggccatacacatccctgctgaagcccgcattacccttcccctatgctatagaagccctgggtcgggggggtgggggtgatggcacagggatccaccatcttatcttggtgccatccctgacttgccttctgttcataaacgcctattaaatgtttctttctgagaaactggatttgtcagcctctttctttggtatctcaggttccttggcctttgcgggtaggtttatatagacctgctcagcacaggacaggcagtttctcaaaaaattaaaaatagaattaccaaatgatccggcaatatcacttctgggtatatagccaaaataattgaaagcaaggtctcatagaaatatgtgtacactgatatttatagcagtggtattcacactcgtcaaaagatggatgcagcctagttgtccataggcagatgaattgataaaatgtggtatatacatacaataaaatgttcttcagccttaaaaaggaaggaaattctaacacatgctacaacatggatgaacattgaggacattacgctaagtgaaataagccagttagaaaaagacaaatacggtgttccttcacttatgtgaagcgtccagactgagtaagcaaactaatagaaacagaaggtagaacgggggttgccagggacatggggaagggagaaaatgggaagttgcttagtggatatagagttttggttttgtcagatgaaaaagttccagagattggttgcatggcaatgtgaatatacattacccaacccaagggctctccttgacccctgttccaactgccacttagaagtggttaaggtagtaaattttatgtatattttaccacaattcaaaatagaattattattttttcattataattttttgagatccctcactctattgcccaggctggagtgcaatggcgccgtctcggctcactgcaacctctgccttctgggttcaagtgattctcctgcctcagcctcccaagtagctggaacttacaggcacatgccaccatgcccaactaatttttgtatgtttagtagagacggggtttcaccatgttcgccaggctggtcttgaactcctgacttcaggtgatccgcctgccttggcctcccaaagttctgggattacaggtgtgagccaccatgcccggctgtcaaaataggtgttttgttgttgttttttttttttgagatggaggtttgcttttgttggccaggctggagtgcaatggcaggatctcggctcacggcaacctccacctcccgtgttcaagcaattctactgcctcagcctcctgagtagctgggattacaggcatgcaccaccatgcccagttaattttgtattttattttagtagagatggggtttctccatgttggtcaggctggtctccaactcctgacctcaggtgatccacccaccttggcctcccaaagtgctgggattacaggtgtgagccattgcgcctggccttttttttttttttgtgatggacttttgctcttgttatccaggctggagtgcaatggcacgatctcagctcactgcagcctctcctcccgggttcaagcaattctctttcctcagcctcctgagtagctgggattacaggcatgcaccaccatgcctggctaattttgtatttttggtaggtatggggtttctccatgttgatcaagctggttttgaactcctgacctcaggtgatccacccacatcggcatcccaaagtgctaggattagaggcatgagccactgcgcctggcctgaaaaaaaattttaacgtttgagaaaatacaaaattttcatagtctccaagtatttctcctaagatctttccccctatgagggggaaagatagtatctttacaatggagaaacccagcagaaacctgaaccaaatgaacaagttcaacatcatcagtaagaagaactatcaatgccataactctgatggaatgcactgggaaggattccacatcatttttgtgctgtaattgccaaaagttcgtaacttcagtccaatcatggaaatacatcagacaatcccaaatcgaggaacatttcataaatactgatcagtactggttcaagatgtcacggttatgaaagataaggaaagattgaggaactgttattgcagtcctacaaaacggcgagagactaagaaataactaaatgcagcgtgatcctgggtggaatttgggaacagaaaaaggacattagtggaaaaagtggtgaaactccaataaggtcttttgtttagcgaatatgttcattttaaatcagttaaattatttaaatatatttaaacattagttaaatgtatttaattaaattaataaaattggttattttgtgaaataattttaatatagttaaatatgagaatgtggatttcctggttctgatcaccgtactgtggctatctaagaggtgcatgttcagggaggctgggggaggaataaatggacattatactattaagttggaagagagaaacctaccccatcagtcacaaaaccctcacattcatggcagtgtgtcggacgttccagtatgaatggcatttcccagatgtcagcgcgaggtccctgtggagggagtggggctccctgggaatctagtggagagcattcggggctcccttcctcaggagcctgcccttcctgcacagaagcgtcagcctcacctctgtaccactgcccctctgcctctcagaacctactcggcttcaggaagattctactgccagcctcctttcccagatacagcctccagggactcagccctgccttcccaagtgttcccgcctctcttgggaaggcgtgctctcagatcccacacccctggacttccccgggcaccacctgctccttcttcatttctccagctctgcgttctcactctgagggtcctctcctgctgggaatgtgtgttgctggcaacagtgaagattcccccctgggttgccccccatgccctgttcttctgcacttccctggcttcctgcgttggttctgctggtgtctcctgcttttgggtttacgtggcttcccagcttcctaatttctctgaagttgagtttgatgtgtgtattgatgatgggctttttcctcctcctcctcctcctcctcctcctcctcttcctcctcagtcttgttgttgccccatatagtttccagaaggagaaaagggacactgtaaaattaagctgctgcaggctgggcagtggctcatgcctgtaatcccagccctttgggaggccgaggcaggtggatcacctgaggtcaggagttcaagaccagcctgttcaacatggtgaaacctcatctgtaccaaaaatacaaaaattagcaaggcatggtggcatgtgccggtaatcccagctactcgggaggctgaggcaggaggatctcttgaacgcgggaggcagaagttgcagtgagccgagatcatgctactgcacttcagcctgggtaacaagagcaaaactccatctcaaaataataataataataataataataataataataataataataatgccatgtttctatcagacccagaaatcccgcagagtgagctggaattctctgtttctctgtttcccctccatacccactggctcctctctgcccactccctcttggactgcatcaccagggtgcctcactgtctggccctagtggaattcacacagtggaggacgtcataggaggtgggagagagagagagaggagaggtggttattcgctcagattcttccttgttggtttggcagtggccacatctttctactgatggctgcagctcctgatgatcctcctctacagccacagctctctttgggatctgtggacacctttcctgtccctctagacccagggagataacagctcccactcttgctggtccaggacattcctcatctcttattggttcccttaactcggtccacacttctgtgaacagcccctttcctcaagtacccattcgaatatgtcctctggcttccaccaggagcctgactgatacccacaggtgggtgaatgctggcgtgctgctgggcccctcttcctctggtgactggccagccaagtctccaggagtctcgttagggtgggcaggcggtgggcacagcacaaactgtgagctcaaatccacagaacaaaagtgggagaagacactggcaggatggaccgccacaaaactcttggcattcgtgacgtctgtcctttaaatcacgcaaggcatcatcatgcttcagacatgagacagcctaagtatttaagtgtttcaaataaacaaattgtttttcagaattggtaattgctaagttggcaaattgctattggaaacgttggctgtccttgactcagtgattcagccagctagtcccttgccaaactagtatgttgggcaaattccaccttgagaatttatctgctcctgtcaaagccagattctccctgcctgaggggaggctggacttgaccttctgactcaggatatgctgacttgggtccctaggtccaagggcggccctcttgggcccactgtgggctggacctcttccatgatggggtggtggagggcaggccccacctgattcacacttgacctcatccaggcaggtgaagttccctgcaggagtcacctgagcccagcccctcagaccaggatccatcatgtttaggaggatttggggctatctcatgttctttggctagaaaggggtcccactcttaggggtctgccctctgtggggcacagatggcttgctggggcccatggacggggctgggtgaatgggaatctggtcacagcagcagcagctggaaggccaagagggagggcaccagggcctgggacccatgtcttgtcctgggcctccccgggcctcttgccttctccccagcaggcatttgggatctgtgtctggacccagcctcgcccagaaggccatggtgtgttgtcattagaatcacagtgctcacaccaaggcagtgcattaaattagcagggcagggtctcatgggcaggggaccatgtggagggggtggggggaagggcagttgtccccagaggccatggtgggcctggctctgggctgggcagtgggccagggtcctgctgtgtggatgagctctgacaacaggctgtctgggtctggtgagctcctgaaagcggggactggtggagagtaccctagggtgggagctcatgaggagggggtctgtggggtctggaagccattctagagcaggcagatgacatttatcaggggagcaggcatagaaaggacccttgtgtgagtggggggacacacagcctcagaagaaacagggaaggggctttgacaggtccagggagaatccctgaggtttcctagaacaattcccaccagccatgtcccaggtgtcaccccatcccccaggcctctgcagtgccagcccaatgccctgggcaaagcatcctggactctggctgttacaaaaggaggacagggtcatctggacccgcctgagctccaggcccccgactttcacagccccttctgggtccagaagttcatacgtatataaatgaaaaatgtgcaagaatcatattattgtattctttttcataaagaggcccctctaaattgttgaagccccgattcacccctgcccaaaggagacagcaatggcatgtgtggggccacagtcttgagacccagaggtcctgctgcccacgatacccactgtccaccctagggggactggccgtagccctggagcccgcaaacaccatgcaggaatgcaagagggtctcagctcccgagtcccaggctgggagggcccacagtccagtaaactaatcaggccccgacacatccaggagagcagctccaggagcctgcattggggagagagcctcagacccctgccacaggcctgcaccccagaagtaggagcatgggaagacctctccttggctcctggccagcagaagtcacattccccagccctctggctccaaggcagcctcacgtcccagtcactccttggcacaccctaccagttggtcagagctcactgccaaagggcacctcaatgatgagtggagggaacaggtgtttaccaggagcttgcatgctttgcctcagggatgattagggacacagccaagaaggcacgctatgcccattttacagatgaggaaacggaggctcaggttgggctggtgactaagggaagcagcatgtggcaggtggcttgaggcatgtctgtccatcatgagtaactagggagcagccctgccactcctcatgcgatgcaccaggagccagggaagctgcttcctaggggattctagctaaggccagaagcatctccctgagtggtggtggaggcctctgtctactcctccaggactgccaggggataggagggcactgctgacctcacagagcctcttgggtgagtgagcatcagctgagcgacaccaggtgactacgcttctgcccagtgctgtgcccccctctgactcgggcaaggcaccaccctgaacgccccaccctgtcccatggaggccgcaaactgctctgcagagccagggtctccaggaatggggagggcagtcaccctcattccacttgtgttcatgactcaaaggactgcccaggtctccaggcccatagaacccccaaacctcttactaggccacactggggaccttgagcagcaggcttggaatcctaggccttgtctccaggtacatatcagtacccaggcttgggaagctttggtctcaggggggctggcactcaggccctctgcctcaaggaagaagcatgtccagatctctactgtccagccctgctccctgcccctatccttcacggggtccctaggacagggttacagaagcctcatgctgtcaggggatgctgccaccctagttccagggtggctccgcccagccccttcctgctgccgccctcactgactcacctgtccagcctcctactgggctggggtgagggcttattgccccagagcctagataggcaccagaggcagctataaaagcatgttgggccagtcctcagcatcctagttcgccactgtctgctgccacacgatgctgggaggcctggggaagctggctgccgagggcctggcccaccgcaccgagaaggccaccgagggagccagtgaggacccagggctcctttctacctgggctggggggatctggggcagactgggtctgtgggaggcggatctacgtaggcaggcgaggacctgcggggaggccttggcccctcaggaaccctggtctcctgctctaccaagtcagcacggagttgaggggtgcagacctggggaggtctcctgggggcagggcatgagtcctggtgctgggtgaacactggcagcttggacccttccctctggaaatctggggagcctttcttgtcaaaacagcctattctgaataacctatgcaggaaaaggaagatggatttttatttttaccataactttaaagcttcaaagatttcttaacaagtcaccaagtctgttcaaagtcaaaaagggcattttcaatttcatccaagtcccctaaagcatgtttatttttatttgtatttgtatttgaaatggagtcttgctctggcacccaggctggagtgtagtggtgcgatctcggctcactgtaacctttgcctcctgggttcaaagtgattctcatgcctcagcctcctgagtagctgggattacaggcacccaccaccacgcccgactaatttttgtatttttagcagagacggggtttcgccattttggccaggctggtctcaaactcctgacctcaagtgatccattcctcttggcctcccaaagtgctgggattacaggcgtgaaccactgcacctggtcccgaagtgtatgttgtattcagaggtcagcaggtatgtgtggggaggcccagccaggccccactcatgggtcatcgtgtgaaaaagtcttgcctgagtttgtgtcctctttctaaatggcagcagatgcgtattttgtttttgactctgcagctggtgtggaccacctgctttaacctttcactagcctctgagttttttatgattcctgttgggagaaaagctcagcgttgggagaaaagctgaggcagggcttgctagacttgctggctccttgcttctagcactgccattctctcaagtagccatatgtttctcattcacttgatacactgtttcctttcaacctccacatcctcaccacctgtttctttgttagatcaccaataaatagcgtgggctcccagaactcggggccttcgcagcctccacactcgcgatagcgccctgctcccattttctctctcgaactgtctctttgtcattcctttgactccgctggacttgccgcccccgtgacctggtgttgggtctcatcatcccaacagattcccattctaaagatgagggaaccaagaggtggaaggtagagttagaataagaaccatttcttctgactctgaaatccttcagttctagcacgctaccacccacactttaaaaaactctgaagtaggcagagaattccgttttgttggaggaattgctttgagagacctggtcttagtggatgaggctttggaaaccaacctgaggcaggcgctagcacatcctgagaggggtgtgacctggcacacaggcccagcctgggcttcatgtctcagctggcaagactgcctgctcattgccattccaggccgggcagggccaaggggcttcagggacccatgccctcatggggctcattgagctcgtctcccagcagccaaggccctggcgtctccaaatgaagccagctgtgggggaaggtccttctcatgagtcagtctgtcctggctgggggtggcaccccagagccccatctaggatgcccagggatgtataggtctgttgtgaggataagccagccctgagccctcaccctggactgggagggcagtgggcctgctctgagccctcaccctggactgggagggcagcggctctgctctgaaccctcaccctggactcgggggcagccggcctgctctgagccctcaccctggacttgtctcctctgttcagttcatgccgtggaggaagtggtgaaggaggtggtgggacatgccaaggagactggagagaaaggtacagccggctgaggtcgggcagggaaggagggagggaggaagggaagctaggtgctgggccaacctgttctttgactaaccaggtcaaactctgcccctaatgttgcagcctttcagagcctcttggctggggcagttatctatgctcatcagaggccacagactgtactgcgttaggacactgtctagatggttctctctgtggaataagaagacaaagtcacacaagactatgtgacagcacactgggacaaaacatttaacatggcagggtgcggtggctcatgcctgtaatcccagcactttgggaggctgaggagggcggatcatgaggtcaggagatcgagaccatcctggctaacacggtgaaaccccgtctctactaaaaatacataaaaattagccgggcatggtggtgggtgcctatagtcccagctacttgggaggctgaggcaggagaatggtgtgtacctgggaggcagagcttgcagtgagcctagatcatgccactgcactccagcctgggctacagagcaagactcggtctcaaaaaaaaagaaaaaaataattgctgggggcggtggctcacgcctgtaatcccagcactttgggaggctgaggtgggcggatcatgaggtcaggagatccagaccacggtgaaaccgcatctctactaaaaatacaaaaaattagctgggcacggtggcgggcacctgtagtcctagctactcgggaggctgaggcaggagaatggcgtgaacctggaaggtggagcttgcagtgagccgagatcgcgacactgcactccagcctgggcgacagtgtgatactctgtctcaaaaaaaaaaaaaaaaaaaaaaaaaaaaaaaatttaacatgtaaaattctatgttaaatgttaaattgatgtgtgtgagctatgagtagtactatgtacaaagcatgtgtatatctcattccttttcaacaaaatagattccaggtagatgaaggacttacatttacataaatgaatttattaacttactaggagataaacatcttagctcaggctgctcttataaaataccataggccaggtgcagtggctcacgcctgtaatcctagcccttcgggaagccaaggcgggtgggccacctgaggtcaggagttcgagaccagcctgaccaatatggtaaaaccccattgctactaaaaatacaaagaccagctgggcatggtggcacatgcctgtaatcccagctactcaggagtctgaggcaggagactcccttgaacctgggaggcggaggttgcagtgagctgagattgcaccactgcactccagcctgggtgacagagcaagactctgtctcaaaaacaaaaacaaaccataaactgggtgacttagaaacaacagaaatttatttctcacactcctggaggatgggaagtccaagatcaaggaaggcactggcacatttggcatctggtgagggagtctttctggttcatggatgggcccagctctgtcctcacatggtggaaggagctagctctccgtggtctcttttatgtgggtgctaatttcaacctcccaaaggccccaccccttaatatcattacattaagactgaggatttcagcatatgagttttgagggggaagacatcgtaaacatttagacatagtaataacatcagagactttggcctaatcttggagaggggagaatctttagaactatgacaaaaaaatcagcgccataaaggaaatattaagtaaatttgacaatccaaaactgaaattttctatagccaaaaaaaaaaacactataaaccaagccaaaagaaaaattatacactgatgaaaaatatttgtcataaaaatgataatccaatataacaacccaatataaaaatggtcaaaagacataagcaggcattttccagaaaaaaggataagcaggcaatgtacccatgagtagatgctcagtctcactcacagttgaagaaatgcaagttgttggggaaattaaaaccaaattcaaattcattctgcagtaatcctgctgcccttggtcccatcgggccactccagagactaatccattaagatggccacatcccacaggccactcaaggggacacaagttcagcaggtggatcactaggacattcttcctctttccaacagccattgctgaagccataaagaaagcccaggagtcaggggacaaaaagatgaaggaaatcaccgagacagtgaccaacacagtcacaaatgccatcacccatgcagcagaaagtctggacaaacttggacagtgagtgcacctgctaccacggcccttccccagtctcaataaaaagccatgacatgtgtacattgagcgctggatttattcccatttggatggaaacactaggcaaagtattttcttgttgacataacatattttacatatttatggtgtacacttaagtatttattacatgcacagaatagtgatcaatcagggtgtttggggtgtctatcaccttgaatatttggtattactatgtgttgggtacatttcaagtcccttcttctagctactttgtttttttgtttttgtttttgtttttgttttgagatagagtcttgctctgtcgcccaggctggagggcaatggtgtgatctcggctcactgcaacctctgcctcccaggttcaagcaattctcctgcctcagcctcccaagtagcttggactacaagcgcaggccaccatctctggctaatttttattattattattttttattgtttttatttttagtagagatggggtttcaccatgttagccaggctggtctcaaactcctgacctcaggtgatctgcctgcctgggcctcccaaaatgctgggattataggcatgggatactgtacctagccttctagctactttgaaatatacaatacattgctgctaactatagtcaccctaggtgaagtatttttcaacagaaacactttgcatgtcccccgtgtctcctctgctgaggtggacactggcactggggcccctgctgctggttggataggtcctcatgatgaaacagatgcttctctgtcatgctaagtaagatctttcatgtcaggaaggggctcttctggaagaatagttagtgtctgtgcttcatttcctaaaaaactgtttcaccagaaactatatacaactttcaggtgcctcagtgcttcaagacatgctaagggaggaccctcatttgtcttgcatgtttttgggatttttcttgagatgttcttgcaggactcagggcagataacagaccagcttgatgaagaatttagcaaggaaggcccccactgagctgcttcctgttctcgcagagatcagataagcatttctgctggacggttacagaatctggtcaaggagagactgagtcactgctcatcatcctagaagctgctgttgattttttttttttttaaagacggagtttcactctgttgcccaggcaggagtgcagtggcatgttcttggctcactgtaacctctgcctcctgggttcaaacaattctcctgcctcagcctccccagtagctgggactacaggtgcccgccaccactcctggctaattttttgtatttttagtagagacggggtttcaccatgttagccaggatggtctcgatctcctgacctcatgatccacctgtcttggcctcccaaagtgctgggattacaggcgtgagccaccgcacctggcccagaatatttatttagagactgatgtcaggcctaagtgttgatagtgggtagtagtgggcaagatgcctggccctctctccttctcatgagcaagtcagtatcatagaggttaaacatatctttaagtagcatttaacttaacattttttaattaaaaaaaagagaagtaatttgtaaaaatattgcatcccctatttctcttgctggaagctatttgttcttagcagaaatgagaaaaaaaggtgttttgcttaaaaaataagtgagttgctcaccatacttctggatctcatctagaattggactcacagtttgtgaacagcccaggtatagccaatgtcttagctttggaacgcttgccactttccagctacagctgaaccttatatcctggtttggttcctgatgactttcaaattctcctgacccaaacgcaagctcagaagcacaagcacattgttggtggcagtacagactgaaacaccctctttggatggcagttcctctcacaggactttattctccaggtatgcacaggcacacacaggtgcccaaaggataaacacacagatctattgtagcatatttgtattactgagagattagaaacatcctaaaatgttaaccaaatcgcttggatgaaaagttttgctctgcttattaggtttggcgtacaatatggaggtgacatctgttacttccagtgtattatagatactttagctccaaaaatgatacctgtacctagatgggcaccaaaagggaatggttaacaaatattgcatatacaggggtatggggcagctccggggctggggatggcggcggccaggtttgcagcggctccaggatgagcgggtggatcccgggaagcgtggtgaaatgggctggctcccgagccagccgggaggacgcttactacagctgctcagaagcaccactggaagctcagatgtaggtgccccagccagaagcagagaggggttcagagaagctacagagaagcccctcctgatgccccagggagcaagccaactccttccaggctccaggaacaccacaaagcaatatgaaacctgttcatgagaggaaccaggaatgccttccaccaaagaaacgagacctccccatgaccagctgctccactaaccacacatcctccagtgatgcctctgaatggtcccgaggggttgtggtggccgggcagagccaggcaggagccagagtcagcctggggggtgatggagctgaggccatcaccggtctgacagtggaccagtatggcatgctgtataaggtggctgtgccgcctgccaccttctcaccaactggcctcccatctgtggtgaatatgagccccttgcccccggaaaaaaaaaataatattgcatatgcagttgattaaatggcatactccatggctattaggagtgatgaaaatgggctgggtgcggtggctcatgcctgtaatcccagcactttggtaggccaaggtgggcagatcacctgaggtcgggagtttgagaccagcctaatcaacatggagctgtgtttactgagtggggctttcgcaggctggagctaagaatttccagtatgcgtaacagccacagcccaaatatctgccagtgagttgtgtaattccccagagcaggcctgggcagtgtctgggtggggcctgggagccacaggagatgcccaaagccaggcagagcccgggggcgaggggacggcaggcaggtgtggcgctgccctgggcgggcttgcacccccacacccaagtgagcggcctgctcactcctcagctgcaggagccagacgtgtggagtcccagcagaggccaacctgtgtctcttcatctccctgggaaaggtgcccccgaggtgaaagagatggcctggtggaaatcctgggtaagtgggagctggcaggagatttgggttcctgcatggtgttgggtgctggtcaccagggagtcctgagaaatgtaaagtcgcccttggctgggagtggctcagtctacatttggctgcctcctgggccaagcatggagggtgggaaggggccgagaagaaacagtcccaggcctagagtgcccacggcagggatgggacctgggccgggagacaggctgatgaagaaatctagaaatgcaagggggaagctgaggtttgagaagagtccaggggagggacccttgcaggggtggggccactcaaaggagggggtatcatggttgagccttgtgtgtaaatgtgtatggggtgcacacacgtgtgcatttggggagaatcaggcatactgctcctggcagagggaactgtgtgcagagggtcagagggcagggagcttggcttcgagggaagctgctcagcacagctcaagggtcctggtaccggaggagatggacctggggaagcaggcagggccaggtcctgaaaggccttgcctggcaggctgaggagttaggctttaccttaagagaagtgggaaggcactgaagggctttgagcatgagagtaacctgaacctgctgttggggacccatcaatgccttcacctcagggatcaatgatgttcatttgtcaagactggagagggaagaggggaagcaggaggacctggcctgctagagcctggaggaacccggggctcagggcagcccatccccagcagaactgatgggttctcgggagctttccatctatggttgagcctgaggccatcgctgtgctaaggagttgaatatccagaaggggacagaggtgacatctcccggctgccggctctgcacacccttttcctttcctcccaggcagcctcaggatgtcagggctgcactttctgttttgcagatgatgaaatgaaggctcagagacactgagtgacttgctagggtccaatggccagcaggctccagtcagagagcagttgggtctctctgcccagccccaggttctctgtgagcttttgtgggatacccaggcttgtccagcttcagggagtctctggatcatagatgtcgcaacccaagcaagtgtcctcagggtcagacatgctaggttctggacaggtgggacaaagaggaagccaggctgaggtggggcagctgtcctggcccccagggaagcagccttcttccaggacaaggggccatggaggcctgcagcttcaaccagactgctgggaacctgcctttgaggaggtggacatggcagggagagcccagtgctgggtggtttccaaagtcagttgctggccaaggcagtctggcactgggccttgcacccagtgcagcaggacaaagggctgtccatgtagggacctgccaaattgacaggatcactgtgacactcactgagtccctactctgtggccggacccttctctaagcacctcacattcaatatctcccttgaacctcacaaggagtctatgaagtagacaccagtatccttatccacagatgaggaaactgaggcacaagtaggctaggcaggtgcccgaactcactagtaagtgtgagagtctaggtgagaatctgaacagcctgactccagggccaaaaccataccctggtcgtccataccccatgtgagagctggctaggggtagcaagttcacaggtagaccccacctgcaacagctgagctgctagcgaagacccagtgtcctctaggcacaaagctgggccaggaacgcgatgggaggagatgagggagccactggagagagatctgtctgcaggcagggtccatctgcacctctctttttggtgttgccttttcctctgtgtctctcatagagacaaacccatctcccaggcctctgggcagccacgtagcaggggaaggccaaggcgtggcagctcccctgtgcctgtcacagaacaagttatattaatagatgtagtcacaggctggtctgagtcaccttttcagtgaaaatgtgcctgtctggactagcacggccctgggcaagaccctgcaggagcctgaggctgacccttccttctcagcaggaggtctggagctccaggactccacactgatagccagggctccgattcccagaacacttattttctaaaaccttagagtgggaagtgagacagaggcttctcaatgcagcaaaatcagaaccagccagggagctgcttacaaatgctgcacctgagacctaccgcacccctgcgggactgcatgctcctcagggatgcggttacacagcctggccactcgctggtgcaccacagcccccgagtgctggggcagagggaagccggcaggcactgagagctgagatgcctcccacattcccagatgacctgcgttcctgtgggtgaagcttccttcagtggaacgttccaggaacactcattgtctgggaaaggtggagtcatcagtagggcaggggaggtagatagagctcagcttctgagtcaggctggggagtcccaacagcatcacttactagctgtgtaagggagtccagctccctttctgtaaagtgaggcatcagtacttacctagcacaactgttgaggaagccatgacataagcattgcttctaaagcacctggcccaggtctggcacacacaaggggcttgaagtgctaacaggagtaatagcagagcgtgactccacaagcaagggatatcgtgtgtgtggacaccgatgagcaatatctgggaccacactggctctctctggatggaatttccataggaattatttctaacaatttctgctgtgaaacatggtgctaagaaatgactcaggaagatctgtcaccagacatttgaaattaaagcaaagagttcagaaagatgccttacctcttactcaaaggaaagatacttacagatataccatccattggaatctctgtattttcacaatctaacccagggcttcgatggatggatggatggatggatggatggatggatggatggatggatgggcgggtgcatagatggatgggtgggtggatggatggatggatgtggtagtcaaatgggtaagtgcgtaggtgggaaagtagatgggcagatgatggaggtgatggaaggaataagtgaacaggtaaatggaagacaagactggatgggactaaactctttttcatcctggaggatctctgagtctccctctaattcaatacctatctccaatatccctccattctctaccattcctccacccaaaacacacttatgtccatgttaatcatctgagaaattctgcagggcacaagtttaaagagccttcaggcaagccctgaactggaggcttggaaatcaagggctcaggcacttggttatctggtttatttcacaatctgcagagcatcgtgcgggtttttctaaacctgacgctctgagccccatgggcctgtggacttgcaaacaccctgaactatcaatatgctcagctgggcccctgccctctaagttgctgtaagtcccaactccccaggaagagggcagactgagctcaaaccattcctcagaaaggcagaaccatgctcagccttccaacctcatctgcacactctgaaggtggtgcatgcagctccaggaagcctttgcttcagtgttctttcccctcctaactttgggtgagtttgtcccttcctgctgctggtgggtgatgctggaaggagctgggtgtggctggggctgctgtctgcagtcagatggcacagacagggacaggaaaggttttgtggcttctccccacaagctctggctctggctactccaccctgttggccaaggggctgaagggcagagcactggcctgcaagggctgagcagatctccgtgcccagggaaggggctcaccctgtcagggcgggctaccagatgggctgggagcctgctctgccctccctgtccctgcctgctttgagcaggcctggttctcttgcagattgaacaggagggtgtcacagtgaagagcagctcccacttcaacccagaccctgatgcagagaccctctacaaagccatgaaggggatcggtgagtgggtgttggcagccttgccacctctgctcaagacccctccgctcacagccctggaaagcgggtgccaggggacatctggggagctggggtgtcccatgatactctgaaactgattccactacccagagaatcacacagccctctgtttctgcagtgaggtcagcacccaccctgcaagactggacaggagggtgctgctcttccctgggtaatgggggtggggaggtgagctgtgtgtctctgtgagtgacttcccatcagtctcagctttctcacttgtaaagtggccccaagaattcttggccttgtgtgtcacatgaagtgtgaagggggtggtgctttatgatgccaggcacagagctgccaggggtgtgaggtgttgggagtttgtggggctgattcaaggcccccttgccccatgtcgatggccatggagccggctcccttcccatctcctgcacttgcccagtgctgccctcagcactaccgtgagtgggcgagggctggcctgaggccagatttaaacagcttgcccagaaagccctcctgacctgagagcagagcatgtaccctgacctcaccccaggtgggactgaccccttagccggctctgcctgaggatcaggggccttaatgagaactgccgctcctgacaagcccagaaaacgttctcatgccctctgctttctgtgaagcagaaagttatctccacttcccaaatgagaaaacggaggcccagggaaatgaggctggctgcccaatgccacgcagttgctgggccaggcctcggattcaggggttggactcttagtcttgaccttcccctactgcgaccaacacaaaggagggcagggccagagatctcactcggccaagctccaaaggcccgggctgatgtccagagccacccagacctcagattccatcttgtgaggctggccttgggcacgccccaacattgtgggggtgtggggtgggaaatggggaggcagatttcctaagggtcttgtttacaccacgaaaatggtctgggggtttggaactatccaggtgtcgggtcccaactgctcagccaccaagcagctgccttcgccttcccctcctccgccctcaccagtgtgtcaccctgggggcagcagggtcacttgtgctgtaaccctgcagggaccaacgagcaggctatcatcgatgtgctcaccaagagaagcaacacgcagcggcagcagatcgccaagtccttcaaggctcagttcggcaaggcaaggggaaggctggtgggggtggggataggtgagccttggggttgggggtacagcctgggaggcagctccattctggacgactttcccctagagccagcccactggcagcatgggcacatggaacatgtttgcatgaaaacaattgttctttattgaaattcaaatgtaactggctgccctgtgttttatctggcagatctacttttaggtgtcagagcccgggccgggggctggccttccttgcttcctttcctgcctcctctctcacagcattccttctcatgcacccaacaggccccactggaggtctgtctccctgcccccaggctatctcgccctgccctctgagcccagaccaccttctcttttccatgccccaggcatgcaggcctggctttgctctgttctggggcgtgggcatgctttcctcagtcgagctgcttgcacccacacctcgtcccttctgccacctgggaattctaagagcctggagtaagcatgccaggccctttgtttctcctcccacctgcactccacccctaggacaaagcctgacatttgggggtacacagtaaacacaggattaaatatgtgcacagccatggttgcctcaagcctctagtgactcatatcattagtttggagatgtaacgaaggaagatcagctcaaatattctcttggagaacccagtatgcatttttacagtttccctctcttagtcctcacagtgatacattctttgtattcaaacatttggggaaactggcactcagagaggttttaagttgcccaaggtcccagagcctgtaatcaacaaggtggggattaaaatccaggtctgacaaagcccttgatctctctgctgctctgtagatcagctgatgtagcctggtggctcctcgtagcaacatgtgaccttagaaggaggcacatgtgagacgaagtctttaattcaggcatgcattcattcattgagtgccaagtgacaggtattttatggtgatgccatactcagagcttgcagtctagctagcaataccaatttcattttactgagagcttatgatgtgcccagcactgcactgaatgctgaattgagtcacacacaaccccctaagcaacgggatgaagcaggagcacgtttctctccgtgtaaccggtaaagatactgatgctaagagaagctaaggagctggcccaagaaacccagccagcacgtggcaaggcccacgcagaatccagcccaagcccctggacccagccaccactccgctgcctgcactcaggtgggcctggcttatgacaaatatcacctttccctgttcccgcattaggacctcactgagaccttgaagtctgagctcagtggcaagtttgagaggctcattgtggcccttatgtacccgccatacagatacgaagccaaggagctgcatgacgccatgaaggtaaccaggcagacagggcaggggagtggcaggggtgctcacatgactgggtaggggcaatgcggggaccgggaacctacagcccagagctccccttgagccactgtttggaatggccatatgggccataactgggcccagtgagcaggcagcctgctgctcagactgcacccaacacctggagtcactggtgcctgattgacacgttgagtggccgtgatgaagccaaaatcagtacttctcagaacctcacgagctcaggtgtacagtggtattggaaacccacctctacagtcccaggcacagccccttgggtttccctttacctctcactactctttgcttttgcagattaataaggatggggacccagtaactatagtcattttgtttggaaagacacttgctgcatgggcactgccaggcattttacacccacgctccctaatctatctttggcgcaggggaggcttcttattcctgtttatggatcgggatgcttaggctccaggacatggagcagcctgtctgagaccacccagctaaggagggagagctgagacagggcttccccgtcacagcacttgccctcaatgttcatcactgaagcatgtgattttctcatcacatcctcccacttcaagtggggcagggcagtgaggtccttcctgaggctcaggcatcttgagaaaagaaggtgtggacagagcagaaggtcatggcagagcactccagcaggcagaggtttctgtccacagggcttaggaaccaaggagggtgtcatcattgagatcctggcctctcggaccaagaaccagctgcgggagataatgaaggcgtatgaggaaggtaaggggtggcacagatggaggggctcaggagtggccacaagctttggcagcctggcagggaacaaggatcaagaattaacctgggccacactagaaaggaccctttggggacttttttacccacaggtgctgagcacctaccgtatgccaagatctgtgcctgatggtgacactgaacatgattcagacttgatctgtaagctcaccagctcctcttacaggggagagaggcctgtgaccaactaaaatctctgcccttgaggactgtggtagtagggggtgtggaccccaggctagcagaggccagtcagtcctccacatcatgtacctagtggggagttttcctggaggctttggctttgccaagccttgagatgaaatggagcttggttggcagcccctagcctggctctctgacctggtccatcttgtgctttgagcttggttgggtacgcatgtcgcttctagttgtgaagcaccacccaggcgacagccacttggacacccgggcattgcatccatgccctgtgccaaggactttctttcctagaaggctttaataaggagaagtatggggaacagggctggaaggaggaaagcaggccccgggtaggctgtgggcctctgcttgtgcctcatggtcctgtttccctgcagactatgggtccagcctggaggaggacatccaagcagacacaagtggctacctggagaggatcctggtgtgcctcctgcaggtgtcacagcctaggctcttgggagtgccttggtttgggagtcccaacagctccaccccagggagcagcccttgaatagcgccacaagagtcagggtaggggcatgggatagcccagcagccagggctcattgggtgtgtctcagcatggttagagggtcccaactgcagagcccccacacctgtccttactcagccatgtgagagcatcctggaagcgggaggagagcaggtccttcgtgcaggcctcatgccaggcactttgcttaccttagctcactgaatccgccaagccttatgaggcagtccttaccacccccattgtacaaatgaggaaaccaagggctgaagagaataactggcttgtcgaagtttccacagccaaagagcagcagagccatgcctgccctccaagcccaggatcccccctgtgcccttaatgctctggtcagctggcctgccttacagagccacctcctctgttcctagggcagcagggatgatgtgagcagctttgtggacccaggactggccctccaagacgcacaggtgaggctgcgcccagccggccatgtggccccaccccctgccatctggactccggctcctctgcccacgggggctttctctgacactgggctgggacccacccagctcagctccctataggcctttgtcctgtggtgtctggggaggagagtgagggtgttgggagactcgggaggaaggagtgtgacttgggggtgggggagcactaaagctctgtcctggcaggaacagcccatgaacccgggggcgctaggccccagtgctggacacaggtgtccgggtctctgtaggtctgcctgctggcagagggaagtctggggaccaggcagttcctagagcagcttgtggcccaggatagagaaaatattctaagccagagctgctagagaaaggggagctccctgtcagagacgaccaagcaggggagcatgctggcctggcagagtggacagggccaggccatggccacagctctgggactctggggctcagtccctcacctccctggtctccctcactggcttattgtgggtgtcccaatgctaggatctgtatgcggcaggcgagaagattcgtgggactgatgagatgaaattcatcaccatcctgtgcacgcgcagtgccactcacctgctgagaggtaccagggagggaggggctggggccggggccacagggggtgtcctggccatgagcctctccctcgtgcttctgccttgtcaagtctagagttagggagagagccagggagcccaggactgtttccccagccaccagtgggaggtcagggcggcaaattgatgtgcgatctctgatccgagacactgaggggcatcacgaggaggtctgaccatcccctgagcagagccctctccacagtgtttgaagagtatgagaaaattgccaacaagagcattgaggacagcatcaagagtgagacccatggctcactggaggaggccatgctcactgtgggtaagagctcagacttgcacgtttttcaggccacagggctcaccgtggggcagcaccaaagaacaaagggcctagggatgcgaccacaagagaaagaatccctgtgtcaccttcacgggatgtccccccgactcacactctgcctgtctccctcacccagggactgctccacctctagagtcccagtgtgtgctgccaaagattgttctctgtgctgcccacgtggtgcccagtgctgtgtgggtgtgtctgcatgagtgtgtgtgtgcgtgagagtgtgtgtgcctgagggtgtgtgtgcatgactgtgggtggaatgtgagtgtgtgtgtgtgagacagacagtgtgtgtgtgtgcgcacacaaatgcatacgccagtgattatgccagccccaaccctgtgtgtactcatggcagccatgcagggagcactctggctgtggttgtgaagccctggccagcacaaagtcatctttctggacatgaaccaggggcctggcccctgccttcattgccagttgaagaaacagtgatgtgtggcttgagtccaaactgagtgacggatggtctgatgctgagaaacactggggatcttccccacagcaggaagtcagggccactcaggaggacccactccagagctctcatgggttccagggctgagatcacaatgggaagagtcactgcagagtaaagagctgaggcccagggcagagggacgtctcttctcccacttacacacagagcccaggtccggactcctggcctgcagctctcacctccacaccaggctgcctccgtgcaaagccagcagccagcaggctccctgctgtttcctagcctctctgggtggacagggccatctgagacaccccagctggccttggatgctgtgatacaatccggtctatgtcaggacatctaatcacacccctgctccaatctcagcttccacccctggatctggcctgaacccaccaagaatgaagtctgccagcagggaatagtgaagccatgcagtgctccgtcatgctgggccttcctattcacttcaccttgaagcctcgcatcagtctcacttcccagatgagtcagggaggttgagtaatgaagccatactgcaccatcaaggcaggaagtgaacacatgcctacctcactcaaagcccatgctccttctgcagccctaagtgaaaatgccaaccttccccacccagatgccaagtctctgagcagtacccatgggagcaagcatgggcccagtctctggaccagacgcccccaggtgccttagtcctgtggggccaaactccacttgtcacatgggaattcaaaatgcagggttcctgctgataagtgtgagagagagggcactctgaggccagcagccaccatcccatggtgcttctgtggagctgagaggctggatttttggtggaggtgtctctgggttgagagcccagggcctgtcctgagtctgagctgcccttggatgggcttgagctggtgtcttcagacgagccccacagtctggtgcatttcacatcttacccttttgcctgcctgcttgggcctttggagctgtgcccagtgccccgggctaccttccctgtcccacgccacctgacacaaagcctctcacattgggaaaggcacggaacaaagaaatatgccaagccttgcacaacactgactcttaagacctaaggcaagacataaagttgtaggcagtgccacctaccagctccagacattaacacagctttcttgtttgccagtgaaatgcacccaaaacctccacagctactttgcagagagactctactatgccatgaaggtaactgtcctgtcttcttcttcctgacgctcaccctacatagcaccaagtgcaaagccaaggagctcaaagccaccacgatcctccacacgggggagttatcttacccaaacctgtcgtggatcagaaaggttttagttctcggaggtgaaattgagtctgggaaagggacgctgcatctccagaggtgaataattccctgaaactaaaaccattgcccgttttctctgattgatggttgctgatatcccctgaagttagttccacacccgaaacccaagccctctggccacttctgcccaggaaatgagagagggcatgcgattcccttggccatgtggccccagctgacatgagactggtcagggatgaaggtgagcaggaaggccctgcctgtgaaattcctggctgagctgattgctgccattgctctagtaggaagtcttgttcctggagcagtgagtattttgtgtctagaatctgatgtggcaaaccaaacatactgcagtttggagcacttggcatcataaaggaagagttctgggcagtgggtgagaaggaattaagggagtggacaccctaagccaccaaagcttccctcctaatgcttccctggctgaagcacaggctccttcccacatctccctccctctaaaagccccagaacccaaccacacagatccgtccatcactcagagatggacaggaaaggtgaggcaggattgttgatggctgctgtcttgcccagggagcagggacgcgtgatgggaccctgataagaaacatcgtttcaaggagcgagattgacttaaatcttatcaaatgtcacttcaagaagatgtacggcaagaccctcagcagcatgatcatggtaagcaggcattcccaatgctgaggccagcctgaaacccagacattcagggaaacctggaggctgtggccaacactacgtgagcccctcccttcccagtgggcaccatgtgcttgcattcatgaccatgtggtgtgtgcagggaacagcagaggtcagtgtggctggatcccaaggggaatggggggcagaggggagatgcagagaccagggcacagaggctcccctgtgtcccactcagaaagttggtttcacatttaagttatggttgctccttggaaaagacaccaaatccttgcagaagaagccacctctgaaaagtcaatgagatgaactagtccggtaggaatcgggcccaccgctcaaatccagatttaagtagtcctggcggccaacttctaaggagataagtcagatgagcgccaatagactatctaaccagattccaattagcaaaagttctggagccttcaaaacacagactgattatcacgctgcgataattgggagaaacagctcttctgggggtgtctgcaaattgaggtcttgatgatttcattagcagaagtcacattaggacaaatgtatccccaagttttctttggctactaagtcaagtctctagctcttctgcaaatgtcgttgttaagtgcacttttcaagaaacacatagctgacaataggtggaaaagacatttctgtttccagatgtttcaagatggcaacatcttgaaacaggtgggcaggggcaagagaggattggaattattcttggtttcacttgaggctccccagccaatcttgtcgggagacaggagggcaaggcacacaccagcctggactgtgctgtcacctgcagacagtctgagctgattgtcattaacccttttaaccacacatggtaacttacggcatcagagagatttctacagatacatgaagccaccctcttcaaattttatctaatgttgttacttaagaaaattgagttagaatcatgaatacattgaccaaacgtttctttttagtgtagaccacagatgtcattaaagcaaaaatggttttcaacactaatatgagttaaaaactcctgcattgaaattaagaggcaaatgtataaacactccaagtataactcatgtatttgaaaaagtaaacaaaattaatgcttttctttctaaaaactattcgaaaaattgtcctcaaaataataaaaatcaccaggcgtagtggcccacacccgtaatcccagtgctttgggaggccaacgcgggaggatcgcttgagcccaggagtccaaggctgccgtgagctaggactgcatcactgcactccagcctgggtgacagagtgagatcgtgtctagaaaggaaaaagttaaaaaaaatttcattgtagtttgaaacccgtaatgagatttcaggctcaaaacaggcaaattttactaaatggtgaaaagtagacaataaccatgagacctaaactggtccagagtgtggaaagtgggtctagccccagtctaccccttactcaccatgccgttgtgaatgaattcactcccctctcttggccccgctgtcctcaactgcatgaagaagaatctgggtgatctgacctggcccatttcccagctctgtatgcagaccccggactagccagtcccatcaggacctaccactatctaagaaacagggctcctcagtcatcggaccacaaggtcagtctcatcaggagacaaacactgtggacccgatgtgagccagatgcagggcagaccagctcgccttcctcctgctgtaccctcaccacgtctcagcaagatgcacagcagcacagcattgatctcatttcatagatgagtcccacagaggtgaaggggcttgcctcggccacaccgtcagggtgcgatggtccaggctccctccacccccggccctgcccccaggtgtgtgctgatgcctcactctcagccttgattcccaagctgccacagcaggtgttgaataatgatgcatcctgttgtgtaaatgaatggctgggcaccctggctcccgaatagaagaaccctgggacagctgaccccttccttgtttaggagtggaactgtctctgattcattttccacatcaatcctgcatgtagttggtaagagaatcaaaaggaaatgtaaaggaatagcctgaaattaaaaacaaggaaagaggggtgatggcacaacccctgcggctaggaaccctggagggccgggccaggtgcaggccaggggcacacctcttagtcataataacacagccgccactgccgagccaggcacaagcaaaccccttctcacgcttatgcgcctcctgcccacaggaagacaccagcggtgactacaagaacgccctgctgagcctggtgggcagcgacccctgaggcacagaagaacaagagcaaagaccatgaagccagagtctccaggactcctcactcaacctcggccatggacgcaggttgggtgtgaggggggtcccagcctttcggtcttctatttccctatttccagtgctttccagccgggtttctgacccagagggtggaaccggcctggactcctcttcccaacttcctccaggtcatttcccagtgtgagcacaatgccaaccttagtgtttctccagccagacagatgcctcagcatgaagggcttggggacttgtggatcattccttcctccctgcaggagcttcccaagctggtcacagagtctcctgggcacaggttatacagaccccagccccattcccatctactgaaacagggtctccacaagaggggccagggaatatgggtttttaacaagcgtcttacaaaacacttctctatcatgcagccggagagctggctgggagcccttttgttttagaacacacatccttcagcagctgagaaacgaacacgaatccatcccaaccgagatgccattaacattcatctaaaaatgttaggctctaaatggacgaaaaattctctcgccatcttaataacaaaataaactacaaattcctgacccaaggacactgtgttataagaggcgtgggctcccctggtggctgaccaggtcagctgccctggccttgcacccctctgcatgcagcacagaagggtgtgaccatgccctcagcaccactcttgtccccactgaacggcaactgagactgggtacctggagattctgaagtgcctttgctgtggttttcaaaataataaagatttgtattcaactcaaagtatctttggatgtttagcagggaccagtgtaggaccaatttaatttgtcagaaacagagctttggggagccacgaagcctgagcgcctcgtgggcatctcccagtgggaacactggatgggctgtacctgagcacctcatgggcatctcccagtgggaacactggatgggctgcagccaccgctgccctggggacaactcttgcaaatgagggtagattctattcacctcctgatgtgtaggctacatccttgtatctcagggttagagagggatttaaagtcagctggtgctgttccaacctgtggcctgactacccccttggcatccacccaggggtggtccttggtgtgcttggggtgcacttgggtactcagggtgtactggcgatactcagggtgcagttgagtactccgggtgcacttggctgcctccaaagatgggactcactgcgtcctttgacagcccaatctttttccaatggatgtgaccagcaaagttcttgctttacctgaaccaaaatcagccgcatcaagcccacacctctgccatctagggccacaacacttattccctcccagtaacaacattttggatatctgaagaaggcccacaaattctgcgatgacctctgtcaaagcccagtgtccccagtcccttcagtggtccctcctggagcctgtttggggccatcacccctgaacatgctccagtttgcaaacttcccctcaagtggccctgaggggtaagcgtgtgcccaggaaccagcctgatcagggagatgggaatagcgtgggctctgaattcacttggacgggaggcagattctggctctgccctgcaccagctccatgactttgactgtgttaggctattcttgtgttgccataaagcaatacctgagtctgggtaatttatttaaaaagggggtttaattggctcacagtcctgcaggctatataggaagcatggtgccggcatctgctcagcttctggggaggcctctggagggaccttacagtcatggcagaaggtgaagggggagccaacatcacgtagcgagagtgggagcaagagaggtggggggaggtgccacacacttttaaacagccagatcctgttagagctcaagatggtgaggacagcatcaggcgatgagggatccgccccctgacctaaacacctcccaccaggccccacctccaacactggggatcacatttcaacatgaaatttggaggggatatccaaactatatcagtgactgagtcacttactctctgagcctcagtttcctcacatttctatacagggtgggctcccagttacaactgctgcctttcgaaccaccccagagccagtagcataaaatcctcatgtataatgttcacagattctgtgggtcagcagttctggagggcacagcaaggtgcttgtctctgacccaacaagtaaggggactcagtctcagttgggaagacctgaaggttgggtgactctagggcagaggggtgcaaccatctggatgcctcttcactcacatgttgggcccctggtgagatggctggaaggccaggctcaactgggactgtcccctgcactcctacacgtagcttctccagcatggtggcctcagggtagcaagtggtagggctccaccgtctcccagtggacaagaaggacaccacattgccttctgtgagttagcgtcaggagtcacatggcatcacttccccggtgccctatcagttgaagacaccacaagccaccccagcttcaaggaaaggggacacagacccaatctgtcaatgagaagagtgtcaacgaatctggggactgtttttaaatccaccacaagtggtgctcagaatatttaacaactggtgcagcacaacccactcacctgaatggctgctgtctgcaggggtggagcagagctcgagtagcggcccctgcagggccaggcctcaacccttagtgctggatggcagggtgtctgtggggccccaggggaggctcctgggtgttgggggtgcagcagctattcaccaacatgtcttagtcttttcagactgacatacaaaataccataaataggtggcttaaataacagacacttattttgcacagttctggaggctgggaagtctaagatcaattcagttcctggggagggcctcttcctggcttgcggacggctgcctttttgacacgtcctcccatgacctttcctctgtgcttacacgtgttcacggggggaagagctctctctctctctcctgctcttttcataagatcactataccatcatgagggccccgccctcataacctcatctaaccctaattagcttccaaaggctcatctccaaacaccagcaaactgggggtaagggcttcaacaatacacaatcagactgtaacacagcaaggcaggggcccttcgggagtttaacaaccttttagtagttgtatcagtgtgcgtctcttggatcccagccctgggtgagaattcttattcctttctttcagttcaagtcctgctctgtgtgcagacttgctttcagttctgagccattgcctagctgctttctgccaaaactctttagaaaggatttagaggggccaggcgtggtggctcagtctgtaatcccagcactttgggagaacgaggtgggcagatcacgaggtcaggagatcgaggccatcctggctaacacggtgaaaccctgtctctactaaaaaatacaaaaaaattagctgggcatggtggcgggcccctgcagtcccagcttactcaggaggctgagccaggagaatggcgtgaacccgggaggcagagattgcagtgagcagagatagtgccactgcactccagcctgggtgatagagcgagactctgtcaaaaaaaaaaaagaaaaagaaaaaagaaagaaaggaaggaaggaaggacttagaggatctctctgccctgcaagctcccctgaccactggttcgatgggttcttttgcagcccaccccaaaacaggcctcatgtggccaaacaggagccttgagaagagctgcagccaaggaaatttggtcaagtccaagtacatgcccagcaaggggatctgcttaagcagagtcatgaagttgatcatctcccctgatggggcagaatggacatcacccccactgcctccctgccagcagagaaatgtgggacaggcctggaagcaagaggtctcctcagattagaggggaagctctctctgcctggggtcagagctggagcagcatgggtgtaaggggtcacggccccatgtgctgactccctccaggtgacccccatggcacctggggaaggaagcaaaggggccctggccaggacaccagcagcatccacagcacctgctaatcatttttgctggagtaaccttttgggcacttctggtaaagcagacacgctccacaggtgcttttgcaattgctctttggaatttgttaaaaatacacctatgtttttaaagataatttggagtctgcctagtttaatttcagcataggggaaaaataagggaatagtgacaaagtttctttacttgagcaaacttgagtcaggctcctgaaccttctaggctcatctgtgtactttcttgtaaaatccaatttgagcaagaatcccactaagtcaattcagcaagaactccccttgttcctatctgaccactcccaatatccgatcagggtcctcatcctccaccttcccaggtgatgtctggtcaccctggcctttcttcagcaggtctcctgttaggtcagtttagccagcatcaccctcacccctggcatttcctcttggtaattttccatctttcaactcctacctgctccatggctccaagtctcaacttctcatgctgtttttagaatcagcctgactgtatattgaggtctcttttcgcttattgcaatagtcctgaataaaatctggttttactactttatcgtctagctctggtttttctttgccataggtattccctacctgtagccttgccatagctctatcatcgttgctttttaattccctccaagagatgatatctacatatactccctctctatcctcagatcaatgttttgcatttcctaggagctgaattccttttcttccattgcagcactggctgggagagaaggcacaacatggtccagcatactgagccccaagtttgtcctgcagcatgatttgagacacagtgttcgtgccacacagaattctgtgagccgtccaatagcctttcatacatttgttttctgcttaaactacagagtagatgctcttgtcagcacctaagaacactctctattacacagaactacaccctaatgacattttatctgtttacgtgtcctctcagaaaagctgtgagccccttgaaggcaggaactttatttgtttttaaacattcagggcctagtagatagcaggctttcaacaaatatttttgaataacaacaaacaagagtatggactttgggaacaggagagcctagtagccagcaagcctgagccaatccttgatggcctccaattctgagaagactctctgggcccccttaggctccctgtggaagaaagcttccccagtcaatcctaataaaaatacttctgagacagatctaacaggacaaagtggagtctctccactctttcagtagctccttcaccccaggtgctgtttggggttctgacactgccatggcatggccagcaggatggcccctagggctcctggggctgctctataagagcttcccacccctgacctgcagtccatgagggcaaggccagatccgggcacacgcccatccgtgttgttctcatgctctcagggggtagagctagtgtgttggacttggcatgtttagggtcacctccctgagggttgacaacctgagcaaaatcagcattcccttggcaaggaataaagggggaatggatttgtggtcagcaacccacatcgttggtcagcaacccaccgccaagcattctgcctgcaacagggtggggctggccaggggaggctcctcagggaaggtgaaagctgtgcagagttttgcaggatgactcagtgcttatcaggtagacagataaggaagaacattccagggagagggaggaatgctaacaacagcaggggatctggtctgtactagacatgccaaaggaatggtgtgtccatatcaacagaggagggagagacagaagagaaagagcttgtcagggcctgagtcagagcgggctcatgctgtggggctaagaagctcaaacgatttccagagacagtggggaagctttacagggacaggcaggggaggatcttaacccggctttcgtaagcctctggcttgagtatggaaggtgagtctgggacagggagcccagcgccgaagtgttgcaacagtatagggagacatacagaccaattccctcccacctaacagctctgtgctttggggtcctgggttagtttcctgggagaaggctggccttggctacctctgtccttgaccaaggacatcgttttaaatatttgtgatgtgtcctaggccactgcatctctgtccctgtagtgaagagaagatactgattcctaagctcctactctgagaacacaaatatctgcaatacttcggtaagccctaggcctgagtgtgaggttgcaggcacttccatggccccatgcaggtgtccaagttccctcgtggtatttggccaaggggggccctgtgtgatgccctagcgcggtgactacccgtgttcctggcccatgggcatcttccacggaattctgggcttagcctggggattcatgcgggcgcatctctgtgatctgctctggagcaggatgtacatcaggtctctcagacctgagtccctggtgcctggcgctcagccttgactgaagtgctcggcccaccctgctgggccagccagctcctgctcagggccacagccctgtaaccacggcttcctccccaggactcaggaattctcccactccggaatgccttgctgctggggtgaccaggtcttcacttgtgaaacaggagtcggccacctcagccctgcgcctggcctggtggaacatgggtcaccgccccaacctggggcagccgccccatcccaacgcagttgctgccgctctccatgcctccctgtgcccagctaaccgggggacttgtcccctgggaaaacctgggtacccaggctgcctttggtttcagcccctactcctcttcccgggctgcctttgctccccggacggcccctttccccgggctgtgttcacatcggctgggaagggtcccttgcagacagatcttggacgaggtcgcgtcccccctcgtgaccagcaaactcctaaaagccgcccttgccccagagcccctgtagcctccaaccggcagtcaggaggcagcgccgtctcagcgccgcttagtggcgccaggcgtgcctggaaatccgctttcgcagcgccccctcgtagccgcctccgcccgcagaaaggcgttccctggacagagaagcgggcgcgcgggggcgggcgcgcggggccttgccggagaacctgactctccgcagcagcagtggaagccagagtgacgcgttgtgttgaacaccagttttctggagcgctgtgtgttctcatagctgagcagtctgtttctccaatcaggtttcaaagccacttcaactgcactggcccctgtgggtcactgctgcaccgccctggcccatgtgggtccctgaggagcgacctgccggggccacctggctggacgaaaaagacacaccttggacttaagccgtgagaaaaaaaaaacttcatcagtaagaaacaagtcaatagacaagtaaaagactaggagaaaatatgcataaaacataaaaaagtgacttgattcctgattctggagtatttaagaattcctataactcaacaaaaagttcagttttttaaaatgagcaaaaggcttgggtaaactattcacaaaggaacatagacaaatgccagtacacacatgagaagcgcatacacatccacaaacttcaaacaagcccacctcatgtatttctagtgagtaaggaaaagaacgcaaacacttttgaaaattgtttggttgtttcttgtaaatttaaacaaataccctattatattatccagcgagtccatccttaggtttttatccaaggataaagaggtgaaaactcatatctaacaaatagacttctgaaaagatgaaaatagaagctttattcataaaagacaaaaactagaaataacccaaatattcattcacaggagaatgaataaacagactaggttgaatccatacaatggaatggtagcagacaataaaaagaaaatgaactattgatgccccctactgcacagcagaagctctgaatcgtgttcctgaatgaaagaagtcaggtatgaaagaataaacattgtatgattccatttatatgaaaatgaatctgtgatttaaaaatcagactagtattaggttggtgcaaaagtaattgcggtttttgccttttttttttttttttttaaatagttgctttggggtttatggatggagtggcatggtagaggttagctgaagggggcatgaaataactttttgggggtgctagagtgttgtaaatcttacagtgggggagggacaggagtgcaggcatttgacaaaacacattgaattgtgaaatttaagatttttgaatttctttgtatgtaaattacctgccaataaaaacatgacgaatagagcagttatgagcatttgtgtgtagctttttgtgcaaacttaaattataatttctctgataaaagcccaggaatgtgattgttgagtaatatggtaagtgcatgttttttgagaaactgtcaatctatttttgggagtggctgtgtgtatcatgttatattcccacaagcaagggatgagaaatttggtttctctgcatccttgctagcatttggttttatcattatatttttatttcaactgctcaaataagtgtgcagtgatttctcatgatctcaatttgcatttccccaaaggctaatgatgttaaatatatttccacatgctgatttgactcggccatgaaatgtctcttcatgtctattgcccaatttcttattagattttttttttactgttgagttttgagagctctttatgcattgtaaatgtgagtcctttgtcagatacgcgtttgcaaatattttctcccctccatagcttgtcctttcatcatcttaacagaatattttgcagaggcaaagtttttaattttgatgaagtccaatttatcaattctttctttaatgaatcgtacttgggtgccatgcctatgaactcatcctcaactcctaggtccagatgattttctcctgtgtcttcctatcatagccagaaactagaaaagaaccaaaatgtccctcactaagtgaatgcttaaactaagtgacacatctatgccaatattcagcaataaaaagaaacaaattattcatgcaaataactaaatggatggatctcaagagcattaggctaagtgaaaaaaaccaatctcaaaaagtcacatactgtacgatttcacttgtataacattcttccaggggcaaaattataaacagtgaaaacagattagtggttggcaggtgttagaggcggtggtggggaagtgtgactacaaagaggtagcaggagagatcttgggatgatgggatagttttgtgtcttggtggttacaggaatctacacatgtgatacaatgtaatagaagaacacacattgtgctaatgtcagtttccttgttttgatattgttctgtagaatgtaaaatgtaaacagtggagaaactgggtgaaggatattgggaccccttcacaaattcttgtcaatctacgattatttgaaaatttaaaagtctaaaggctctgggcagggcctctctctctctctctctctttctctctctctctctctctctctctgtgtgtgtgtgtgtgtgtgtgtgcacgtaggttttctattttacatttcaagcagatggccaggcccttggtattgcacaggtgcttgcagtgtgtattagccagggttatccagagaaatagaaccaacaggctatatacaggtatatgcaagaggagatttattataggaattggctcatgtggttatggagactgagaagtcccacggtttgctatctgcaagctagagaaacaagaatgtcaatggtgtgactcagtctgaggccgaaggcccaagaagtacagggctggggggtggggcaatggtgaaagtccaaatgctatgacctgaaagttagtgtcccctaaagattcatatattgaaatcttaacccccaagggatggtatgagaaagtgcaggtatggggaggtgattaggtcaccagggtggagcctcatggatggaattagtgcctttataaaagaggtcccagagggctgcctcagcccttccaccatgggaggacacagaagacattattggccaaaagatgctaacaatgaaccagagagctgactctcaccagaaactcaatctgccttgatatggacttcccagcctccagaactgtttaaaataaattcctgttgtttaaaaattatacagtttgcagtagtttctttagagcagcccaaatggactaagacacagtgggaacagtggcctgaagtgaaactctcttccatcttgtgttaagatggaaactcctgagaggtgatgctcagtgtctctgaatgagggagtgggcagggaggtagagaaggcagaggtcagggagttagagatgtagcttgcacgtcactggacccccaaggggtgtctagatggtgccaggcccagggacccagcctcaccatggccctggactgaaggacccatgcaggctggacagtgggtgattggggaaaccaagaggactgctgaccagggggcttctggacacaagactttgacccaaccctggagaaggaggagcccttcagggttatgtgaaaaatctctctaactatcaagaattccattttgaaattatgaatctttgagatgaaccacaaaccttgcaaaaatttcacagaccacttgagaatgtggccccagcttggggtgttcacttcctctatcagctggagaatttccatggaaagtataggaaagcctgccttagagtccatatgggagatcccagcctgagcctggctacaggctatgcagaggcaggacccaagaggagaccagaaggacaggactgtagtgactataggttgctggctcatgatcacccgggcagccaggcctcagcaggaccagacattggaaagcccacaggacccctgcttggggtctccttcaggtttccctgctccctgggccatgcggcctcagctctgctgtcttctccccacctctgcctctctgtgtacttggctgctagtagccctgcagtctgcggttgctcatcctctgttcagatgaccccatggccactttgctggggagagattctgatcccatagtctgggtcaagctgtctatgcctgatctgaccaccaaggtcataccatacaatcagggctgctgctggacccagcacggggtatggagaagtttgagggtgtggctgtgggcagagcaggtgtccccaaagttgtctccagcaagtggaggagcctgttcacctgtctccccatgagtggcccctgtcaccttgcttcctttactcctgctccagatgcttccacgaagctgagccacatgggaaagcaagcatccctctgccaccctcactgccttggcaccgccccttccatcagatcccactcctgcctgctgcctgcagcctacctggtgagctcatgccagctcagagaccagggctgggcctgggcagagggagtcccatgccttatgtgcaggaagcatgggtctgggctgttaacagcaaagccattgtatttgtccactaggcagccagaacaaagtcccacgcactgagtgacaaaaaaacagacattttttttttcctcagaattctgcaggctgcaagtccaaggtcaaggtgtggggagggttgttttcctctgaatctcatggagccaggttttgctgatggccgccttcctcctgtgtcctcccatgcttttccctctgtgcatgtctgtttcttaaactgttcctataaggacaacagtcgtactggatcagggcccaccctaatgactttgtttaatttaacctttacaaatcctctccaaacacagtacagctgcattctgaggaatctgggttaggactttagtacataaatttggggaggacacaattcagtgcatgccaagctttatcagcagcactaccctctctaagtggtaatttctaaaagacaatggggctctggggaaagactccaacatgttttgaagccaaaaggccccagttccagctggactgcatcgttatgggtagtttgggggccacaggcctcctggcttctgcagagaccacagctgtccagagtgaatgagattcaatatgtcccccctgcccagcacacccggggactcctctatggctgctcctgcaggatgagctccaggcgtctgatgccatgctgggtcaggaccctgtggctcaggccagcctgcaataccggaggggaccttggaatctcgtcatttcctctgacgagtgaggagccagggtagaccatgtgggtgccctcattgttctggggcagtgaccccctgctcatgatccctgtggaggttctgggctccagggacatccaggccagaatgcccagcagttcagctcatgagtccaaaggtaatctgggagtctcaaactcacggatacaattattgcaaccagaaatcctggtcctttcttccctatatccctgcttctgtgggtgggtgggggcatcccaggaggaaaactcttgctcagagagcagatggccctggaggtgtttgtttgacagctgggactccatgaagggaagggtggccccagctcaggctgtctcagaaatgggaaggaacaaagtctgcagaagctctaccctggggcccaggggacagcaggcacaggggctgagaggcatctcccatttaccctccccccagggtcttcctgccttggtggcctcagacatcagtggcgcaggggcctccctgaggactggcatgaagatgagaagggggtggtgacagtccattgttccaggagacacaagtgttacatttgtttactaggccgatgttacaaactgatttttaaaacaatgcttgcagagtcatggaacaaataccacggagcagcacctagcacagaggaaggccccctgccctgggcatctgtgggaaaccagggccccaagtctgcggtgagctggtgcagaaactctgagctgaggagctaacattatacccatctgcaactgagagaacctgccaggctccaacaaagccaaacgggaaactctccccgggagacaccgtcctcatccagggaaaccaggattctcatggaacgtcattttctactgaagaggagcgcagaggaaaaactcccaggtatcccaaagagaggcagcaaatacaagaaacaaggagattcaagtcccagaaagtaaagagaatggagtgatctaaaaggaatatttaaatgagggagtgtgaaatgtttaaacaagataaaggaataaaattatatgacaagaacagctaattaatacaaatgcagttttaaaaggaccaaagttctaaaattcatcaatgagaaatgaaacacaacagagagtttaagacaaaaggtggaataactccaaagacagacctgagcagcatctgccctgcagcactgctgaccgagacagaaaccagaaacaggatattgtgcacaaggagcacatgagaagtgtctagcaggacaggtcactccagcatcctccgctcaccccagcatcctcagctcactccactatcctcagcccactccagcatcctccgctcactccaccatcctcagctcactccaccatcctcagcccactccaccatcctcagctcactccagcatcctcagcccactccaccatcctcagctcactccaacatcctcagctcaccccgttggggaggcaaccattgaactccctctgatttttctcattccctctggatgctgatgcttagggaatgcagaccccagcccaccaacttctaagcaaagccagcaatgagaggagctccctgcttgctggaagggaaggggagtccatcctccctgcccagcctagggacttccgagatgcgctggataggtctttcccccttgatctttagcacaacccagagggtggtgatttccccctttggcatctggttggacaatggatgggcttcgctgagggctggcagccttgttgagcctgttctttcagagagtgggagtgagtgtccaaagggtcctctcagccgcctcctgctacatgcccctgcccactctcctagggttctgctggggaccccagtgggggcaaagctcaagcctgggaaggatggggaaggtctctgggcacaggtggagaatgtgaaataacatgaattcagcacttgccatgtgccaagcaggatgctgagcacatccaaacccccaggacctaaccatgcttacacgctaggagggaaggcacagagcattccagcctgtgcacagggtcaggactggatgggcccctgggtcctggctgagccgtgctgtccttccattctccagtgctcccggcctccagcactgggtggcaggtgctggcaggctgccccacacatcggcctgccccaggctgcccttgcaccagaagttgctgcttacgggactctaggggactctcctcaaactactcaggaccccagcagctcactggaccctctagctgcatggtggccccagagggcttttgtggtctgacctcagtaaatgcaggtgatgggaagatggtgtggggaagctgtgggtctggcctgaattgtgttccctctgctctgccttgtttgctgggtttctgaggtggaggagggatgagggagaggagaggggaatggggtgaagaggcaaagaattttccagtagagggagaccagctgtgagagctgtgtgtctgtcttcctgcatgctcagcatggagtgtgtgagtgcacatgtgtgtgcatatgtgtgtgtgcggggtgtatgtggtgtgtgtgcatgtgtgtgcttgtgtgtgcatgtggtgtgtgtgtgcatatgtgcatatgtgtgtctgtgtgatgtgcatatgtgtgtctgtgtgattgtgtgtgtgtgtgtgtggtggtgcatgtgtgtggtgtgtgtgtgcatgtgtgtgtggtgagtgcaagtgtctttgggggtgctgggattgtggggatgcagcgagttgccatcctgactctcctttgtgggcccctcttctccacaggcctcagagtgctttactacatttatctcacctccctatatctagcaaggggccccaaagcagaagagttgaggtgggaggtggggaatgggtgtcacccgccctggctgtttctctggcttctcagggccacgtgcttcctctccagcccgagaacacggctgtccttcatcacctactgcatggaggacagcatcgtcctgcagctcacactcacactaggcaggggagtgctgctttgagcccccaagggaggcctgaggggctgggccagagggagctccagggagctgaggggctccctgagaccttggttgggagcctgacagcacacatggcaggctggtcaggacaccactcagtgcccatcctgatctcaatgactgtttccctgaacgctccggcccctggctgcactgctactgcaggtccttgtgctccgaaagttctcggcctccctgatcttctccctcccctgccctccctctgccctgcctccttccctgggaggtggctgtgaggattccttgggtgcaggggctggcggggcaagtgtgtgtatcctgtgaacacctgcctatgctggcagctgctctctgtgtgtccctctccgccctggccggtgggggagggagacagggtcaaagccacggggagtgctgaggctttagcgcagggaagttggtgggcccagacaggggagccactgggtggagtcctgagttccaggccaggctgggaagctggagggaggcaggaggaacaagtgtccatggtgctggaggtggcacagccctagggcactgcagagctgataggcggggaggtgaggacacttccaatgcagatgcctggaactgagcccagagggaacgaagcacagaggagaggtgaggacactgaggacgggagggggcctgggcccctcttgcagctttgacggggagcagggaggaggcttcccctctgtgggagacgggaggcttgggtgtgtgcctcctgtgctgtgggtttgggagagagagactgaagtgggcatgagggggaagaaagcaagtctatgggggaggactgtggtgggagatgcagagaggcagtgggggcagggcccttcaaaggctgagtgaggaagaatgggtggctgcctcccctccaacctccctgttcctgggggtcctcccccaaactgaattcccagaggctgctgtgaggaagcggctgtgtctcaaccaatgtctgtgtgtccgctgggccaaatcttcacctggtgtcactgagggtccaagaggaggcggctggaccttgagtactcaagggccctctccccaccatgcctgaagcaaggagcccaggaaaggtctcacttggcccctgcacagggtgggcttagcgtgatgttcccgccctgaaatctgtggtgctctctcaggccccaggggtacaggctgtgcactcagccaggccctccctgatgtcaggtgtaagtggagccacaaggctgcctgaagataccatgtctcatgcctcagctgagcacccaggcctcgatgccttcttcagggctgctgaacactcggggtctctcctccctgtccttctgtgtgcctgtggcaggcaggacacccacagcggcagggccaggacacgggtgcggcaggcgagccacttaggaccctgctcagggcaatccatcacagaagccctgttttagctgcgattccagagacctacaggtgattccccatctcctgctcttcctgatccaacaaggaccaccgggcacccactctgaggctcagggagtgtgtccttccaccactgtggctcctgccctgagacaaacaccacaggggacacagggcaggtggggctggccccaggagccagctggggttcccacaggtctgcagctgccaagggcattggcctccaccccgcctcctggccctggccctgtgcattccaatccctgctgacgcctggggtgcccctggtctatgcacccaaggaaagctttctctgaaccctgcttcttgtctttctgcagtgtcacaccttcaaggcgggctgtgggtgaagctggcctgccgacatgctttctgaggctttcaaggattttcaaaaacgggagcccacagttaaaagcccaactttgacaggcacagtggctcatgcctgtaatcccagaacattgggaggctgaggtggggagatcgctttagcccaggagttcaaaaccagcctgggcaacataatgaggccctgtctctacgaaaatttttaaaatttagctgcagtgagccatgatcgtgccactgcatgctggcctgggcaacagagtgagaccctgtctcaaacctgaacattctttctaaaaatgcaaatttctagattttttgtaaaatgggaatggcaggaatagtgggtgtccctccatgtcggcccctggctggggcctggggcttcaccctcctcacatggggagctgcagggcccaccttcattccaaggccttccaactgccgacttcagctggcttgtcctggcctgctcctcctcatggtatctcctgtttggcctctgaggtcacccatccaatggccatgatgcttccttaggaagaaacttgtgggggcactgagactgtgagagagagagcaggaaaggccagcttggtgccctgtgctgagctcccaggcctgggtcccctcagtgcaagcattgggtcctctcccacagctgaggccaacagcagctgcttccaaatgtgatgctcccaggctgcactctcaacatctccctgctcaggtttctaaagggcctttgccagctggacactggaaggtacatctgagcctgggtggtgcacaccttggccagcccaactcggctaccctgagcagggctaggggctgctctggaccttcatggaacgggtggttccaagttacattctgcctctgtccctggcctccttcctgggctccctagaaccctcctggcttcttggtggcagcctgctgagagggctcattctgttgcatctggggttcaagcttctgccttggcctttccctgctgtgactgtcaccctccatgtggggcagctttgcacaagtcggccaactgacaggtcagtgctgtgactgccgggccacgtgagcagaggcagagggccgagctggtgggcagagggcacctgtcaccttgactcagctgcctccagggaggagtgacgactcacatcctcacctggggttgccagggctgctcagacgccacagcctgtgcatgtccaggggacatcatcagaggagcgcagctgtcacactggctgcacgactgagcagctttaaatcaggagcaacagaaagagaccccgacggggaggggaactctctactccacccccatcctcagctctgcatcggggagaggcagggtcgaggacagagcccaggaccaatcatggaagtgtcagcgcagctcctgtttctgggacctaccagctcccagccctgtgccagtccccgcagagctcagtgccctgggactcaagacaggcctaacagcgtcctttctgttcatgggaggcactgctggagcttgctgacattggacaatttgctcctggtagtgtgcccatggggagcagagctcagacatgtatggtgtgtctgtccccacagcctactgccagggcaccctgcagtgagaaacagggaggctagagcccagctgctggtctggggccagtggcacccagccttatgctgtccccatggagggaggatgcccagggctcccttcctctccagcagctgcagctgtgtaaatgctggtcaagcagagccccagcacacacaggcagaggtcaggacagatgaggtcatcacagaggaccacacagggctgtcaccacccatgccaggaccctggatggtaagagggcatcctcaccatgtcccagacagcagagacagatgctgtgatttatcctgtggggccaaggtgagctgagggtgtttgtgtggacgcctttgttgggctatggaggtttccttctgctcacaggatgctgacgcccccacttcttgttcttcatcccctgagataaccgcctggttcctgtttctcgttttgttgatgtggtaaattacacagatatttcagctcctgcacctgcctggccttcctgagaggaggcctggctgctcctggcctgtggtctgggttagctgctgctccatgccatttgctggtgtttccctgagagcttctcacacatgtcttttcttgctttagggttaaacttattgttgtgaggtaacaacacaagaattgtacacaggtactcacaccaccaccgctgcatattccccccacagcaatagacactcacattcacactcatgtgggccacacatccacacccccccacccatgcagattgcaccacaaacacactcaacccaccccataccacacacatcacaccacacacacatacccaaagcacacacacacataaatagcaaacacacatacaccaaaaataccaaagacacaccacacatcccatacacacaccacacacatcacacatcatacacgcaccacacaaagggcacacattcccctctctgccacacaacacacacacccagcatgcacccaacaccatacacagcacacacacatcacacacacacacaccccacacacactacacacccagcacatacacatactcacacaccatagacacacatacttgatacacacagaacataccatacaccacacacaacacaccacaagatacacatacacagtgacactgccacacataccacatatcacatacacagcaaatacacacacatcacacatagccctatacatgtacacaagcaccacactcaccacacactatgcacacataccacatgcacattacctatcacacgcacccactacacacacacacatgcaatgccacacacataccacacacaaaacacccacacatcacacatgaccctctacacgcacacagccaccatacacactacaaaccatgtatacatactacacacataccacctatcacatacccccaacacacacatgaccacaaacacacaacacattacacaaaaatagcacacacaatgcaccacacaccacagaaaaacacacactagacacaaaacacacacacattgaaccctcacacacaccacacaacaaatacaccaaattcacacactgcacacccctatacacacatacagacagctacccatactacatacatgtcacataccacacacaccacacacacacatcatacgcagcacatgcacaccatcacaacacacacatactacacaccacaaacacacactacttacacatgtgccacaccacacagaaaatgcacacacatatgcccatcacataccacacacatgtagtacacacacacccacacaccacaaacacacataaccacatacacaggcaacacacacaaaccacagccttttcctcacccccagacgtaggcacagacatttctgccctcagcagggcctcctcagctcttacctcctgcacacacagtgggggctccgcagacctaactgcagtgcaggcctttgatgtgagctggaacacaggaggggtggagcagggcagggagagtgagcctctggccataggagccaggcgcctcagcccctcacatcagcccactcatggcatcaatggtgcttctcagggccttgaagccattctccactgcaaacacatggtccaggctgtctgcaattgttgttatctacagagatgggaggtggcttggactcccggccagggggtgaggatgcagcagatcccaggctcaggggacaatgtctgtctgctttgggggcagcagaatgtcaggctctgagggccacaggcttctccagccagcagcccactcttggggagcggaggagctcttcagccctcccctctggtgtggtgggatttatacgatctgctggtcaatcacttctgcagtggccatgggtcggcccaactcacttgtggcaggttagatgatggggtggccctgggagagccacttgggacacctttccccagtaggctccagagtgacacctgccacctgttctgagtcacccgctcctactcacattggctcatacccacgatgtaaatggtggcccccaggctgagatttatcagcccaggagaaagaaggtgctgagtataaatcacccagggactctggtattccccctacatgaccaccatggggacagcaggtgcttacatccagagttgaaatattccatcttctgaattgccttcaaaggaatgaagaaatattgagcctggacagtgagatgaccccagcaatgttctaagaacttaagaaacttgaatacattatctgtgctctagtggtctgtgccctttcaaatcctctcagtatgaacatttctcctgctggcaacatgtacaaagagccctacatatttctttttgaaaaaaaaaagtaaaaagagggttgagatggagtggggttgactgttaaaaatcggcttccaagctctccaggagccactgttcattgtgcagggcttcctggatggaggagggggccaggcaaggtctctgtcctgctcattcctcactgtgatgttgactagagatttcaaggccttctgagctcatcccagtctcagggaacacaggcctaagtgacctcaccaagggccccacctggaccattgatggtgagagaggaagcttcccatggatgtgcaaaggcaactcaggctctaacagtggaccaacattcctagccctaagcctaactgcaacacagggatgtgcagctgaggtcagggacaggcaataggacaggccttcctaaccatagccctgtgggctctcttgtattgggcactctagccttcaacaggcagggctgagttcaggaaaactcagcccccacagctccatacccccgaccctgactcagtctccccttgtctctttgctataggaagcagcaaaccagctcaattagagtgccagggctccttgacttcctgtgcccctgaaacaaaaagaccaaaggactttgttccttatttcccttcttattgtttatatttgtgattgggttgttttatctaatgattttcctttctctttctcctttgtgtataagttataccagtgagttttatagttttgcattttttcatcatggtggttattatctgttcatttccagatacaagacttccctgagcatttcttggaagtcaggtgtagttgtgataaatttcctagtttttgcttgtctgtgaaagattttatttctccttcattcctaaagagtaactttgctgggtataatattcttggctgttagtggttttctttcagtactttgaatttatcatcccactctctcctggcctgtaaggtttctgctgagaaatctgctgttagtctactgggtatttccttatatatgacttgactattctcttgctgcttttagaattctttctttgtctttactattgacattttgacaataatgtgccttggagaggatctgtttgagtcgaatctgtttggggttctttgaacttcctggacctggatgtatctctctcctaagacttgggaagtcttccaataatatttcactagatgtattttcctcatctttccccttctgcttttcttctggaattctcataatattaatatttgttcacctaatggtgtcctatacatcctgtagatctttgtcaatctctttcattctttgttgtgtgtatcctatgaatatgtaacagtactatttgtcagtgtattaggccatttttgcattgccataaaggaatgtttgagactgggtaatttataaagaaaacaaggttaattgactcatggttctgtaggctttagaggaagcatggtgctgatgtctacctggcttctgtggagacttcaggaagcttccattcatggcagaagatgaaggggaaggaggcatgtcacatggcacaaacaggagcaagagagagacagcgaggtgacatacacttttaaacagacagatcttgtgagaagtcactcataattgtgaggacaatgccaagaggatggtactaaaccattcatgagaaatccacccccatgatccaatcacctcctactaggcctcacctccaatactggagattccaattcaccatgagatttgtgtggggacacatatccaaactatatcatttggttaaaaaataaagtatatagtacagagtctataaaaaagactggaatgggaagccacgtcaaaaaacaggacttgtatagctgacgttgccccaaatctggaaggtcccccaggactgaggtgggtcctgaggtgttaggaccacagggctgctggtgcatgcagctctgtgcatttataagatgaatctatcctgtactagatttgatgggggatgctctaccttgctctggggtcatatgtctaaatggatggcattatatgaaatttttttcccccagtgctggttccaaacttgtccacaccattaaggtgactaacgtactggataagtctgatgatgaaacctgatggcaagggccttgttttctacccaatacaggctgcagggcaaaccatttacataacataaaagaggtttgtgggaaagacagtatcaaaaagtgtggaggaaggggagatagatggttccagatacaccagctacccatcttcagaggtcaccctactcagttcacaccctttagaaatgcttccccattgcctgcaggatccagtccccatgcccaaccaggaagcagcagggggcttcagcacagggatgaagggcgtgcttgagtggccagtgttgagggggaaaagatcccagagttcctgcctggtgctgccctccctctccttggtcctggctctgtctgtggtcagatctcttgcttcctcctgggagtgtcaggctcatatgcagcctcagtgggcatctggggaagccaggcctgtgtctctccagagtgtggggcacagagaagccaaaacacagcatccagggggaggaagtcacctgccagcagcctgcactgccttgcaacacacggccctcatcccatccccaccagggcccagaaaggcctgactgcagccccgagtggccaagggatgtccaccatgggtcctgggctgctttctggcctgttcttgccttcctcttctctattccctggtctcaggcaccttccctcaatgagcagagcatggtcctctcacctgccttacccttgtgtgcccccctaaagcagggctcctttcccattccaccagctcctgcccaggccccattcccacctcatgtttcaattcaggacctgtactcagccagcacatgtccttccaacttttgtacttttcctctaaaactatccctggcttctcctcctcctacatcaaaaataccgttttatttccagattccaaactctctgtggcccacagtggccatcccctaacccataaggctgccaggacccctcccccaggaggagactgaagtcttatctgggtgtgtttctggggacagagctgaggtgagctgaaggatcctgatgccttctggaggcagtgtctaagctgcattgcttcctcatgaccacattgcttttcagggcagtcaggatactttgtgcaaccttattcaccaagctgcaaccaggtgccatagatatggtgccagtgcaggggctgggtgagctggggcacagagaccttcccagtgggctgaaggccatggcttttgcccttgacaattgccctctgggatcatggctcttcagagagccatgtcaggcatctgctgaggagggctgcacaaggcacatcgaaatggtgcccatgggccccccagactgtgtctggacatggaacccattcatttcatttgctggtcacttgaggccaggaatgctgctgggtgtgtttgacaaggttgtgtgggcaaccctgacttgttctaacagggagtaaagataccctccttggtcatcaccttggaaccatgagaaagcaaattgttaagattgtcctcctccttgtaacataatgaggactaatacgtattgagtcttcctgtgggccagttgctagactaagaactttccacgttttcactattttaatcctcccagtaactatacaagtaaatgctactattatcccagtttactgaagggaactgaagcacagagaggttgagttacttgttccaggttacaaagcatgagattcataaagctggatgtgaactgggtctggctcctgctcttcacactgccctgcccctctttggaccagcattcaagacctggtgatggttactcccaaaccactggagagcttccctgctcgggccctggttcctgggtttgcctggagctcatcttcctgtgcttcccgtggtcagatccttggcccagactgagccaggagcctgagggatgatctgatcctcagggtctgtggtgagggctgcactggacacattccctggatcagcccaataaggaacagaggagatcactgaccaggaaggaaggccctccttgggcctaggttggagtctggatgccgtctctagggtgtgaagagggggcttcaggctgcccatgattgagccactccaggaaggcatagactgtcctggtacatcctggtggtatgttccgggctctgggcccagctggctcgtagttaggagtggcggtgaaggtggaatgtgcttttgagccgtcctgagccctgagaagaggtagagagaggctgttgttgtacctccaggctgaagtctgggccaaacctgtagacattctggtcattcttgctttgaattcagttctgagcttggtgtgacctggggaagggaagacaatggttctgtgaggtgaaagagctcccaaacctgtgtcagaagaggagagagacagaaagagacagaaaatgtctatctttagtgctggggaaagagactcagccaagtgctcgtgctctggggctttgagatcagagtgctccctccctcggagcttcagggaaggcagtttatcagaggcaagatcagagctgaggctcaggcttagaagacagctgagccttggcgtgcaaagttagtagatgcagagaagagccctcaaagcagaggggtgagggagggtgcctgagacatggtcgggtcttctaggggctggggatgtgggtgcctggagcttctgctttcagatctccatctcagcccctgctgtctgcagctgttgtaagctcatctcagctacaaggcccacttggtgagctcttttcatcattctgcccaaagagcttgcttccagggcttcaggtgccaccagcatttccccagagttttcatggtggtaagaacgtggctcatgactggtcctttttgtttttgtaaaaaaataaaataaaattttaggatcttctaaatatattatgccaaaggggacgctaagctctggaaactgagtcatgtagcatgcttgcaattctgcttcttagattatagcttaactctcttcctcgttgttctagttctataaatgactaggagagaccagagatcagacatccctctgtccaatcactgatctttgttatcaattacctgcctcctttattgtcctgtttctgagaccagacggtaaccaaaataccttgatatttacatcttcagtgtggaatgttaaatctacctttcccaaaaagaaagaccacctcaactaatcagaccattgtaagtatgcagtacacctttttaagattttgttaaacatcctgaaatttgtctatatgaatgatcccaaacttctacactttggaatactgacctccattctttggactctgtgctttctggtcagcctatccttacactttgtgcttgaataaactctctttaaattgtattttgaccctttgattattttagattgacgttcggccaccttgaagggactcaaagtgcgcctcaactgatccctcctgttatgtcatcgaccaaggctttggtgccaagatgaatgccttttcattcgcccaacttgcaaggactgacaggaatctctgccatggctcctcttgggtttcgaatctctctaattttggtttgagattcagacattattttagtgatccagttccacatttgatggagctagaattgaagctctgcttttaaggtaggagtttcacacacacacaacattagaatatatatattagaatatatccatatatattaaaaattctgctgttcatggatttgtgatttttacttttctctaaggttgcaggttgcttgttgaactacccttcagagtttgtacgtccttttctctcaccacaattttggtcagggaagaaaatagtttccttctctgaaaagaggaggtgaatgtttcatagcataagaaatatttaagaagtatttaagaaataaatactttttatttaaaaactggctaaacgctgaagcttggttcatttggcgtatgtaaagtcactttatgagtgagcaaaaccaatgagaaactttctttgaggataaagatgagtcctgggataagggaaagttttcttctttgccaaaaggaacctcaagcaattaaggtcttgcagaagtgtttgacttcattgcttgtaacatgcgattgagttcatggcttgtaacatgcgattgtcccccaggtaatctccaagaagaacatgcagtgaagcttgtttaccctggtgggcacataagaagggttgttcttccagtgccgtaagtgctcatgattcctggatttagtgagccatgtaaaagagaagaagtgacacaagagtgacaccttgaggagtaaacccccttaagcagcacaccagatccaaaacatctttccctttcagtctttggtcacttgaaaagataatccatttttttcaagatggcggactagggacattggatgccagatctccttaggaagaaggtcttaagttactgttaaatggacaagttctgaactgaaaacagagggaaaagagccaggacctgtcatcgtgcccatagaaagaagctgaggcatggaaaaggaaagcagcaagagtctcgcagagatcaacccccaaggaactcagagccctgtggaaagtgtaggtgggagtgcttctctgctcttctctcctctgtgacaatctactgaacgcccaacttttggagagcaccttttcgcttttgacccagggaaacactattggtagctatttgagaactccccagggacagcaaactgcttggccagcttgtggaggcatgctcacattgccctcagaagcaaactgagattgtgggcaccatactgagtgtgcattgatggtgctcctaccctgactgagaattttctgcccttgagtcactgtaccaccagatccccccctgctctcactttggctagcatggctggtccccagggagttgtgggactccctggagatctaacccttggggtgggctgcccctaaaggaagaggaaaggaaacacagcctgccaaagcccctcttaggataaagagtatgtgggtgtgggccaactgctgcaggggcatcattgatgactgggaacaaatgttaggaggggtttcatctcccacctcccccaccatacactgttgtggatgcaaaggtggtcgtccctgctagggatggtgagcatgaactcaaggaaagtgctcttcatggtggcaccacccctactgaaagtgagcctttgcctgcttccagctttcatgaaggcaaaggcctaactccctcatcctacacagagcagcagcatcctggcaatggaggatagaccatggagttgcctgccatggactaggggaagaggctctgcttcaggccccattttagtgatattcatcagagaggtatatccacagcccccagccacagtgtggctgggaaccaaaggatgaagcctttataaacagaaggtcatgggtcctgtgacaggggtatcgtaggaaagtggatcgcattcctgtcggctcaggatggggatttgcagcacccaccttttctttgcctcaggacctcaatgcattccatcataatctcttcctggtgtattcagggcgaatgcatccattcagcaccagccagcctgccggctcttactcttaagtgctatctactggacagtagcctgaactgcatgagcaaacaaaaaacctgccaccgcaagggcttagtgccagtccatgaaataagcctcctgagacttccacaccctcagccctgcaggagatactgtgtttgcccttacacccaatacatagctataagaagcaacacctaagaaagccactgcactgaagctatacacaaccaattaacctatacagagccttggtcccctgaaagcacccagagatgaagccacacaatcatatacaacatacatgacagccacaccctcaagagaaaaaaataagtttacaaaagtcccatttaaatgacagaaaattcaaatttaagaagctacggctccctcagatgagagggaatcagcacgattctgacagtacaagaagccagagtgttttggcaccttcaaaggatcacacagctgctagaaatgaatcctaatcagactgaaatgtccaaaatgacagataaagaattcaaaatacggatttaagaaaactcaatgagatccaagggaaagttgaaacccaatacaaagaaaccagaaaaataattcaggatatgaaacacaagatagctatattaagaaaaaatgaaatagaacttctggaattgaaaaactcactataggaatttcaaaatactgttggaagctttaacaatagacttgaccaagcagaagaaagaatttcagagctggaagaccattcttttaaattaagccagtcagaaaacaataaataaaaagaattttttaaaacaacaaagtctttgagaaatatgggattgtataaaaagactaaacctacaacttattggcattcctgaaagaggtgaagaaaaagtaagtgattgtgaaaacacatttgataaaataatttagaaaaaaaatcctaatcttgttagagagttggcatccaaacacaagaaattcagagaactcctgtgagatactgcacaagatgggcctcttcaaggcatatagttatcagactatccaacatcaatgcaaaagaaaatgtcttaaaggcagctagagaaaagggcaaaatcacgtatgcagaaaatcccatcagcctaacaacagagttctcggaagaaaccttacaggccagaaaagattggggggcctatttttaggattcttaaagaaaaaaaaaattagtcgagaatattttatcctgccaaactaagcttcatacacaaaggagaagtaaaatcttttctggacatgcaagtactaaggaaattcatgaccactagaccagtcctacaagaaatgctcaaaggagttcttaatatggaaataaataatatttgttaccataaaagctcacataaggccatgtgcagtggctcacctctgtaatcccagcacttggggaggctgagttgggtggatcacctgaggttgggagtttgagaccagcctgaccaacatggagaaaccctgtctctactaaaaatacaaaactagctgggtgtggtggtgcatgcctgtaatcccagctacttgggaggctgaagcaggagaatcgcttgaacccaggaggcggaggttgtggtgagctgagattgtgccattgcactgcagcctgggcaacaagagcaaaacttcatcaaaaaaaaaaaaaaaagaaagaaagagaacacaaaagtgcaaagcccacaggccctataaagctattgcataattgagagtacaaaacagctagctaacaacactatgacaggatcaaaacctaatgtatcaatattaagtttgaacaaaaaaggcctaaatgttctacttaaaagacatagaatggcaaattggatagaaaaacatgagacccaaccgtctgctgccttcaagagaccaacctcacatgtaatgacacccataggctcaacataaagacatggagaaaaatctatcacataagtggaaaccaaagaagaacaggagttgctattcctgtatcagataaaaccaatagtaaaaaaaaaagacaaagaaggtcattatataataataaaggatttaattcaacaagatttaagtaatttaaatatatatgcacccaacatcagagtacccagatttataaaacaaatactactagacctaagaaaacagatagatatccatacaataatagtgggggactttaacaccccactgacagcattagacagatcattgaggcagaaaactaataaagaaactctggacttaaatttgacacttcaccaaatagacctaagaaatatctacagaatacttgacccacaagcacagaatagatattctctgttcatgaaattctctcatcctgatcacatgcgaggtcataaagcaagtctcaatacattttttaaatgacaccatatcaagcatcttcttggaccacggtgctataaaatttgaaattaataccagaaagatcttcaagacaacacaaaggcagggaaatgaaataacttgtttttgataacttttaggtaaacaacaaaattaagtcagaactcaaaaaattctttgaaacaagtggaaacagagacacaacacaccaaaacctctgggatatagcaaaatgttaagaggaaagctcatagcactaaatcctttcatcaagaagatagaaaggtctcaatttaataatctagtatcacacctaaatgaactagaaaaataagaacaaagtagaccctaagctagcagaagaaacaaaacaactaagatcagagcagaactaaataaaattgagttcaaaaaacccatacgaaggatcaatgaaaggaagagttgggccattagacccattgagaaactgctagctaaattaaccaagaaaaaaagagagaagatctgaataaacacaatcagaaatgacaaagatgatattacaactgataccacaaaaatacaaagatcttcagagactactatgaacacctctatgtgcacaaactagaaaacctagaggaaatgaataaattcctggaaacacacagcctcccaagattgacctaggagtacttgaactcctaacagatcaataatgagttaagaaattgaatcagtaataaaaatctaccaaccaaaagtgtcctagactagagggattcacagccagattttaccagatgtacaaagaagagctggtaccaatcttactgaaactattccagaaaaatcaaggaggagggattcctccctaactcattctgtgaaaccagtatcatcctgatatcaaagtctggcaaagaaacaacaacaaaaaagaaaactgcaggccagtacccctgatgaacatagatgcaaaaatcttccacaaaatactagcaaaccaaatctagcagcacaccagaatgataattcttcacaatcaagtgggctttatacctgtgatgtgaaatgattcaacacatgcaaatcaataaatgtaattcaccacataaacagaattaaaaaccatatgatcatctcgatagacccaggaaaagcatttgacaaaattcaacatcccttcatgataagaaccctcaacaaagtaggcatcaaagaaacatacttcaatttaataagacccatctatggcaaaccacagtgaacattatactaaatgggcaaaagttggatgcatttctcctaagaactggaaaaaggctaggatgtatactgtcaccactcctattcaacatagtacaggaagtcctagccagagcagtcaggcaagagagaaaaataaaaggcatccaagtaggaaaagaggaagtcaaatgatctgttccctgatgacataattctatacctagaaaacacttagggttcctccaaaagactccttgacctgataaacaacttcagtaaagtttgaggatacaaaatcaatgtacaaaaatcagtggcatttctatacagcaataatgttcaagctgagaaccaaatcaagaatgcaatcccatttacaatagacacacacacacacaaataaaatatcagggaatacatttaaccaggaaggtgaaagatatctatgaagagaaccacaaacactcatgaaagaaatcatggatgacacaaacaaatggggaaacattccatgttcatgaactggaacaatcaaaattgttaaaattaccatgcttcccaaagcaatctacagattcaatgcaattcctatctgattcccaacattgttttttcatggaattagaaagactaattctaaaattcatatggaattaaaaagcctaaatagctaaagcaatcctaagcagaacaaacaaacaaacaaacaaaacaaagcctgaggtttttttcatattacccaacttcaaactatactacaaggctatagtaaccaaaacagcatggtactggtacaaaaatagatacatagatcaatggaatagaacacagatcctagaagtaaagctgcatactgacaactaactgatctttgacaaagttaacaaaataaacaactgggaaagaacaccttattcaataaatagtgctgggaaaactggctagccatatgcagaagaataaaactgaatccttacctctccccatatataaaagttaactcgagatggattaaagacttaaatgtaagacctcacattgtaaaaaccctagaagaaaatataataaaaactcttctggacattggtctaggtgtagatttatgactaagatcttaaaggcaaatgcaacaaaaccaaaaactgacaaatgggacctaattaaactaaagagctggaggattgctggcaagatggccaaataggaacagctctggtctacagctctcagcaagatagacccagaaggtgggtgatttctgcatttccaactgaggtacccagttcatctcactgggactggttggacagttggtgcagcccacagaggatgttccaaagcagggtggggcgtcacctcatccaggaagtgcaagggataggggaattttctcccctacccagggaagccatgacggactgagcctgaggaactccggcacagatactgtgcttgtcccacggtctttgcaacctgcaaagcaggagattccctctggtgactaccctgctagggccctgggtttcaagcacaaaactgggaggccatttgggcagacaccgaactagctacaggagttcttttattttcatacactagtggcacctggagcgccagttgagacagaaccattcactcccctggaaagggatgctaaaaccaaggagccaagtggtctggcttggtgggtcccacccccacagagcccagcaaactaagatccactggcttgaaattctcactgccggcacagcagcagtctgagatggacctggggcgcacaagcttggtggggggaggggtgtcctccattgctgaggcttgagtaggtggttttatgctcacagtgtaaacaaagccactgggaagttcaaactgggtggtgcccactgcagctcagcaaggctgctgtggccagactgccagatttctcttctctgggcatggcatctccgaataaaaggcagcagccccagtcagggacttatagataaaaccccaatctccctgggatagagcacctggggaaagaggtggctgtggggcacagcttaagcagatttaaatgtccctgcctgacagctctgaagagagcagtggacctcccagcacagtgttcaagctctgctacgggtcagactgcctcctcaagtgggtccctgacccccgtgcaccatgactgggagacacctcccagtagtggccaacagacacatcatacggagagctctggttggtatctggcaggtgcccctttgggatgaagcttccagaggaaaaatcaggcagcaatctttgctgttctgcagcctccactggtgatacgataccaggcaaacagggtcaggagtgggcctccagcacactccagcagatgggcagcagaggggccagactgtcagaaggaaaactaaaaagcagaaaggaatagcatgtccattcaaagaccccatctgaaggtcaccaacatcaaaaccaaaggcaggtaaatccacaaagatggggagaaaccagcacaaaaaggctgaaaattccaaaagccagaacgcctcttttcctccaaaggatgacaactcctcgccagcaagggaacaaaactcgacagagaatgagtttgatgaattgacagaagtaggcttcagaaggtgggtaataaacccctccaagctaaagaagcatgttctaacccaatgcaaggaagctaagaacctcgaaaaaaggttagatgaattgctaactagaataaccagtgtagagaagaacataaatgacctgatggagctgaaaaacacagcacgagaacttcatgaagcatacacaattattaatagccaaatcaatggagtggaagaaaggatatcagtgattgaagatcaacttaatgaaataaagagagaagacaagattagagaaaaaagaataaaaaggaatgaacaaagcctccaagaaatatgggactgtgtgaaaagaccaaatttacatttgattgttgaacctgaaagtgacaaagagaatggaaccaagctggaaaacactcttcaggatattatccaggagaacttccccaatctagcaagaaaagccaacattcaaattcaggaaatacagagaacaccacaaagatactccttgagaagagcaaccccaagacacataattgtcagattcaccgaggttgaaatgaaagaaaaaatgttaagggcagccagacagacagattggattatccacaaagggaagcccatcagactaacagcggatctctctgcagaaaccctacaagccagaagagagtgggggccaacattcaacatttttaaagaaaagaattttcaacccagaatttcatatccagccaaactaagcttcataagtgaacgagaaataaaatcctttacaaacaagcaaatgctgagagattttgtcaccaccaggcctgccttacaagagctcctgaaggaagcactaaacatggaaaggaacaactggtaccagcgactgcaaaaacataccaaattgtaaagaagcctaaatagccaaagctatttacaatttatgaagaaactccatcaactaatgggcaaaacaaccagctagcatcataatgacaggatcaaattcacacataacaatattaaccttaaatgtaaatgggctaaatgccctaattagaagacagactggcaaattggataaagactaaagacacatcagtgtgctgtattcaggacactttgcacccatctcacgtgcaaagacacacataggctcaaaataaagggatggaagaatatttaccaagcaaatggaaagcagaaaagcaggagttgcaatcctaatctctgataaaacagactttaaaccaacaaagatcaaaagagacaaagaaaggcattacataatggtaaagggatcaatgcatcaagaagagctaactatcctaaatatatatgcacccagattcataaagcaagttcttagagacctacaaagagacttagactcccacacaataatagtgggagactttaacatctcactgtcaatattagacagatcaacaagatagaaaattaacaaggatattcaggacttgtactcagctctggaccaagcgggactaatagacatctacagaactctccaccccaaatcaacagaatatacgttcttcttagcatctcattgcacttattctaaaattgaccacataattggaaggaaaacgcccctcagcaaatgcaaaagaatggaaatcataacaaacagtctctcagaccacagtgcaatcacattacaactcaggattaagaaactcactgaaaaccacacaactacatggaaactgaacaaactgctcctgaatggctactgggtaaataatgaaatgaaggcagaaataaagatgttctttgaaaccagtgagaatgaagacacaacataccagaacctctggaacacatttaaagcactgtgcagagggaaatttatagcactaaatgcccacaagagaaagcaggaaagatctaaaattgacaccctaacatcacaattaaaagaactagggaagcaacagcaaataaattaaaaagctagcagaagacaagaaataactaagatcagagcagaactgaaggagatagagacatgaaaaacccttcaaaaaatcaatgaatccaggatctggttttctgaaaagatcaacaaaatagactgctagccaggctaataaagaagaaaagagagaagaatcaaatagatgcaataaaaaatgatataggggatatcaccactgatcccacagaaatactgaccaccaccagagaatattataaacacctccatgcatataaactagaaaatctagaagaaatggataaattcctggacacacacaccctcctgtctaaatcacgaagaagtcgaatccctgaataaaccaataacaagttctgaaattgaggcagtaagtaatagactgctaaccaaaaaaagtccaggaccagatggattcatagccgaattctaccagaggtgcaaagaggagctgataccattccttctgaaaccactccaaacaatagaaaaaaagggaatcctccctgactcattttatgaggccagcatcatcctgataccaaaacctggcagagacacaacaaaaaagaaaatttcaggccaatatccctgaagaacatcaatgcaaaaatcctcaataaaatattggcaaaccaaatccagcagcacatccaaaagcttatccaccacaatcaagttggcttcatacctgggatgcaagtttggttcaacatacgcaaatcaataaatgtaatccatcacataaacagaaccaatgacgaaaaacacatgattatctcaatagatgcagaaaagacctttgacaaaattcaacaccccttcatgttaaaaactcttaataaactaggtatcgatggaacatatctcaaaataataagagctatttatgacaaacccacagccaatatcatactgaattggcaaaaactggaagcattccctttgaaaaccggcacaagaaaaggctgccctctctcaccactcctattcgacatagtattggaaattctggccagggcaatcaggcaagagaaagaaataaagtgtattcaaataggaagagaggaagtcaaattgtctctgtttgcagatgacatgattgcctatttagaaaaccccatcgtctcagcccaaaatatccttaagctgataagcaacttcagcaaagtctcaggatacaaaatcgatgtgcaaaaatcacaagcattcctagacaccaataacagacaagcagagagccaaatcatgagtgaactcccattcaccattgctactaagagaataaaatacctatgaatacaacttacaagggatgtgaaggacctcttcaagcagaaccagaaaccactgctcaaggaaataagagaggacacaaagaaatggaaaaatattccatgctcatggataggaagaatcaatatcgtgaaaatagccatactgcccaaagtaatttatagattcaatgctatccccatcaagctaccaccgactttctgcacagaattggaaaaaactactttaaagttcatatggaaccaaaaaagagcctgcatagccaagacaatcatgagcaagaagaacaaagctggaggcatcacactacctgacttcaaactatactataaggctacagtaaccaaacagcatggtactggtactaaaacagatatatagaccaatggaacacaacaaaggcctcagaaataacaccacacatctacaactgtctgatctttgacaaatctgacacaactgaaactggaccccttccttacacatatacaaaagtcaactcaagatggatcaaagacttaaacataagacctaggaccataaaaatcatagaagaaaacctgggcaataccattcagtacataggcatgggcaaaagactttaaaacacaaaaagcaacggaaacaaaagccaaaattgacaaatgggatctaattaaactaaagagcttctgcacagcaaaagaaactatcattagagtgaacaggcaacctacagaatgggagaaaacttttgcaatctatccttccgacaaagggctaatatccggaatctacaaagaacttaaacaaatttacaaggaaaaggccaggcgtggtggctcacacctgtaatcccaacactatgggaggctgaggtgggagaatagcttgaggtcgggagtttgagaccagactgaccaacatggagaaaccctgtctcgactaaaaatacaaaattaaccgggtgtggtgatgcatgcctgtaattccagctacttgggaggctgaggcaggagaatcgcttgaacctgggaggcggaagttgtggtgagccaagatcatgccattgcactccaggctgggcaacaagaacgaaactcgatctcaaaaaacaaaaacaaaaacaaaacaaatttacaagaaaaaaaacaaccccatcaaaaagtgggcaaaggatatgaacagacgctttttcaaaagaagacatttatgcagccaacagacatgaaaaaatgcccatcatcactggtcatcagagaaatgcaaatcagaaccgcaataagataccatctcacaccagttagaacgacaatcattaaaaagtcaggaaacaacagatgttggagaggatgtggagaaataggaatgcttttacactgttggtgggagtataaattagttcaaccattgtggaagagtgtggtgattcctcaaggatctagaactacaaataccattccacccaacaatcccattactgggtatatactcaaagaattataaatcattctactataaagacacatgcatacatatgtttattgcggcactattcacaatagcaaagacttggaaccaacccaaaagtccatcaataatagactggataaagaaaatgtggcacatatacaccacagaatactatgtagccataaaaaaggatgagtttatgtcctttgcagggacatggatgaagctggaaaccatcattctcagcaaactatcacatgaacaggaaaccaaacactgcatgttgtcactcataagtgggacctgaacaacaagaacacatggacagggaggggaacatcacacacaggtgcctgtttgggggtggggggctaggggaaggataacgttaggagaaatacctaatgtaagtgacgggttgatgggtgcagcaaaccaccatggcacgtgtatacctatgtaacaaacctgcatgttgtgcacatgtaccccagaacttacagtataattaaaaaaagaaaaaaaccatgaaaactaaagagcttctgcacacatacatacacacacacactaacacacacacacacaaaacactatcaacagaataagcagacaacctaaaaaataggagaaaatatttgcaaactatgcatccttcaaggtactaatatatagaatctataaggatcttaaacaaatcaacaacaaaacctccaactgactccattatcaaatagacaaagggcatgaacagatgcttctcaaaagaagacatacaagtgtccaacaaacatataaaaaaatactcaacatcactaattatcagagagatgcaaatcaaaaccacaatgagataccacctcacacgagtcagaatagctcattaaaaattttaaaaataacagatattggtgaggatgcagagaaaagagaatgtttatacactcttggtgagaatgtatattagttcaactcctatagaaacagtacaaagatttcttttaaataatttttttttccggagcatatgtgcaggtttgttatataggtaaactggtaccatgaaggtttgttgtacagattatttcatcacccaggtattaagcgtcatacccaatagttattttttctgctcatctccttcctttcaccttccatcctctagcagatcccactgtctgttgttcccttccttttgttaatgagctctcatcatttagctcccacttgtaaatgaaaacatgaggtattttgttttctcttcttgcattattttgctaaaaataatagcctccacctccatccatgttcttgcaaaagataggatcatgttttttatggctgcatagtattccacagtgtatatgtaccacttttttttttaactctaatctgtcattgataggcatgtaggttaattcgacgtctttgctattgtgaatggtactgcaatgaacatttgcatgcatatgtctttatggtataatgatttatatcttctccaaatcaagggcatctggaatataacttactgcggaagtggcagaaggtctgttatatgcctctgagaccctcttcccaggaaaactctgggctactaccagtgatattcactcagctgtgggtgcagtgactgttctgtattcatgagccaggggccttgccttatggagtggggatgggggttcccagaaaagaggggctggactcctctctgtatggtggctgcaatatgctggaggtgccagtataatgactaggccctttgctccttcccagttctaggactgttagggctgcgccactgcaactgtagtggcagagaggttgtggcttgactctgggattacctccttggggaatgctgggctgcttctgattgtggtgatcagggaggggcagggtggttgtgccggaatccaggtcgggtggccctgcccagtgaggagaagtaagaactgggatctgcatggagaatagtctggctgcttttccgagagaaagttgttctgtgctgggggtttggaccagcccctggttcccacagactcttccatgcctggagacagcaagagcaagggttgcaagacagcaaagatggcaacccacccctcccactgggagctccatccagggagttgcagagctgctcctggctccatagccctggtgggggtggctggaggcctgggccttaagcaccttcccagtgaggagatattggaatgggcatccatgtaacagtctgtccacttttccttagggctgctgcagtatgctgggagtccactctagtccctagttacctctgattttccagtactgtctccctggatgggggagatttccctggttccatgtgtcttcctggtgggctgtggtcctgccttacttttctccattttctgtgggtagagttgttttcttgattagtcccaatgtgtgtacctggatgtttcagttgaaggtgctgcatttacttgccctttcctttcctctctgtgagagtggtgcacattagctgcttctaatcagccatcttggccacttcagaattggagatttcttaaagaatgaaaaaaatagaactatcgatggacctagcaatctcactactgggtatctaccaaaagcaaaatacatttttctatcaaaaagatacctgcaatcatgtttattgcagcactattcacaatagcaaagtcattgaatcaacctaagtgccaattaggattgaataaagaaagtgtggcacatatataccatggaatattatgtggccaacaaaaagattgaaatgtcctttgcagcaatatggatgctgctggaggcccattatcctaagcaaattaaaacagaaacagaaagtcaaatactgcatgttctcacttgtaagtgggcactaaacattggatactcatggacataaagatggaaaaaatagacaactaaggactccgtaagtggggaaaaagggaaagcaaggtgtaaaaactacctattggatactatgttcactatttgggtgatgagttcagtagaaacctaaagcccagcattatgcaatatcctatgtaacaaacatgctcatacatctcatgaatcttaaaaaaaaataaaaaaagagagagctcaggttatgagcaatcatccctttaagaccaagtcagtcttcttgatgagagatccccctttagaaactccagcttgattcgtgtatttatagatttatagtaccatctcctgtcagtatctagaaaaatgttcttacctaatctatgaagacttaaaactaaaaaggtctaaatgggatacctttgatatacctaaattcttttatttatgtgcagtgatatgcacctccatatcttgttaaaataaataatttatattttgatttggaggtgacaaaatatcactgcacataaaaattaataaataaattactaatattaaaataatttttatttatgtgcaatgatgttttgtcacctccaaatctcatgttgaaatgtgatccccaatattggaggtgacgcctggtgggaggagtttctgtcatgggcgtgggtcttgcatgaatggcttagtgtctcctcacagtaatgagttcttgctctgagttcatgcgagatctggtcgtttaaaagaatgtggcacctcccccgtctctctcttgctcccactcgtgccatgtgatatgccagctctcccttcgtgttctgccatgattgtaagaatcctgaggcctctccagaagctgagcaaatactggcaccatgcgtcttgtacagcctgcagaaccatgagccaataaatctcttttctttaaaaattactcaatctcacatatttatctataataatgtcaaaatgggctgatatgagtctcatgccccttccagtagttctggtgtttcatgatgagtatcttctctccaaggacaaaattgggtataagatcagaaatgtattcatgttttggccgggcacagtggctcacgcctgtaatcccagcactttgggaggtcgaagagggcggatcatgaaagcaggagatcaagaccatcctggctaacacagtgaaaccctgtctctactaaaagtacaaaaaattagccaggcttggtggcacgcacctgtagtcccagctacccaggaggctgaggcaggagaatcgtgtgaacctgggaggtggaggttgccatgagccaagatcgtgccactgcactccagcctgggtagtgagactctatctcaaacaaaaaaaagaagaagaagaagaagaaaaatgtattcatgtttctctaaacagtcactgatgcttgacactagtatgactaaggataaagtatgccactggcctattaataatactttacagagtaaagagcatgggaagagcttctcagtaaaagaaactagttcgttacctgatatggtttggatttgtgtccccgcccaagtctcatgttgaattggaatctccagcattggaggaggagcctggtgggaggtgattggatcacgggggcggatatgccccttgctgttctcatgacagtgagtgagttctcatgagatctgattgtttataagtgtgtggcacctcccccttctctctattcctttactctggccatgtaagacatccctgctttcccttcaccttccaccatgattgcaagtttctggaggtctcctcagccatgcttcctgtacagcctgcagagccaattaaacctcttttccttataaattacccagtttcaggtatttatagcagtgtgagaatggactaatacattacctttaacactgatggtgccccgtcagagggatgaaacaaaattgcctcatttgagagataagacaactcaattttaggatagtataacacaaatttgggactgttttatctgccttaccctctgctgtggtcagctcagtcaacttgcccgtttgttttgtgaacagataaattataccaaaaatgccttactcaacaacactgaagatatgggatgaatatccaaagaatgatatatccgcactattacattacaaagtactgattggcatgatggtgaacaggcacaatgagcaagtatttattggttagctccaaatggaatgtcttggctatgtagtactaacttctggccatggttacccccaggatggttaagaccatgttccttggcttatgcttgggcacaggttaagtagttcataccctgtcaaaatctgcaaatttttctcacagtctcgttgtgttcattctgtgtttcatcggtatgatcatttagctttcatctttataccacaaatcaggtattaagaatatcatttgtcatgaagatatcctaaccaattatacacaaaaggccctaaataatagctgcatggatatgtcattgctaaacaagtaagttgcttttatgagaactgctacattacagaagagtatggctttagacacactcagtgcagcctgaggaggaacttgtacatcagaaaaactcagtgttgtgtctctaccccagatgaattgaacaacttcatgaaattaatcacgggtatacaaattcaaataactaacttttcagattctatactctctgattagttatgcagctggtttgtatcttggagaacttggtgtaaaaaactgttactaattctgggaattataatcatttgttgtgttttgttctgtttttgtctacactgctgttatggcatgtgtttgcaatcgagtcaatgcacaaccaaaagcggctagaataatggttgctcagagaactgctttgaacaaagaggcagtcatgtggcctgaatcaggtttgaggaccacttctcccctgtttactttatacgttggctttagttctttctaattcttcccctattggacatgacttcctacgaatgagccttcctagtagggtgagattttgacttaaatacatgattcttctgccctgttttctctgaaataatttgaagaaaatgaagaaatgtaaaagaagtaaaatgtccagaacttctaaatttattatgccaagggggaagttaagccctgaagactcagtcacatgccgtgtttgcaattctgcttcatagattatagcttaattctctctcatttttctagttctgtaaatgactaggagataccagagaccagaacgcctcccttcccatcattgatgcttgttatagattacttgcctcctttgttgtcctgttcctatctgagaacagagggtgctcaagacctcatgatagttacatctttagtgtggaatgttaaatatacctttcccaaaagagaaagactatctccactaatcagatcattgtaactatcattaagcttcacatggacagatgttacaattcagtttaactttcctgaactttgtctgtataaatgttctctaacttctccactttgtaatactgacttgttttttggaatctatgcttcccagttggtccatcctcaatcttttcaagtgaataaattatctttaatctacattctgaccctttgattattttacgttgatatttttctgacctgcgggagactctttgtgactcagtttgtttgactcataaacccgcaggccactggtttgaaacctaagccactaccagagctgattacaacctctgggagagccaggactggtcagacgtcactagctgctatatccagaaacctggctccttcaaagagaaactccttgtgctgagacaggcctggtggtgcaggggacaggagccctcatgcttgccctccactgggacactagggtgaggtgggcctctggttgcccctggcatcaagtgaccaaaggccgacacccatagagcctgccttcctccagggcccaggcctctgtggcaggatccggctgccccctcctcccacagtcccagcctgggggtcacagcccctctccactgtgcttctcacctctatccctcttatcctgcacactccttggcacccacagcaataaacaatcacagtggggcaggtgttcacaggaggcgggggcagtggtgatggaggaggaggtggtttctcctattctggctcctaaaaaatgaaaaacagaactgtctgcttcctttccgggcagatcctgggtgcaaggccatggtgtcgttgcctcagcaccaggcacagtgctgaccactcccagatgtgtatctggggaatgaaaggactagtgaggagcccacaccacaggggagaatcttttgtgtgagaaacatgcaaactcctcctggtttgcagacatggtttttcccctaaatgccaacgacttcgtctctgtccctttgtttcttccgcggccagccctgttgaaagaggcctgctctgggggctgtgcaacagtcccagcatttgcagatgactgtctgcatccacctggttgcagatgcagcctccctgagcccactctggagcaccgcagaggccagccttggccagggaggcctgttcccaccccatcccaggcccagggcctcctgcgtcagctactgccctcaccacagcctatggcccctggggtgggtccctggcccagaagcctgcttccagactcctggcccctgtgttcactgggctgggtgtctctcccagttcggtgcctgccaggactcccgcatccctagaagctaaccccagccagcccctcgtccctgccaggagacagggatccagagaggccaaatggagccacatctgcatccggagcctggggacggggccaggtccctaaaacacggggctccttttccagagcgcctccgtccttagcatcttatacatgctctgtggaatattgagaggcgagccccatttattcaggagagatcatcacagttgctgaaactggccaccccaggctgtgaattggtgagaagcctcattttgaggggtgcagggagtgggaagggcgtgctggggacatcactgtgagtccccacccttctcaggcttcactctgcccctctgtcaccctcttctctgcctcggcaggtggaggtcatggggcgcagccttcatggcactcttggtgaaggtcagtgggctccttgggatgtgacaatatcgggaccggaactgcgacttactttttctggcttctgcacaggtggtggatccttgacagtctagaatgttcaaaagagaaaaacgtgggctggatgggggtggacaggctctgccttggccctgcacagagctcggaccctggtctggagcagggctggatgggggtgggctggctttgccttggccctgcacagagctcggaccctggtctggagcagggctggatgggggtgggctggctttgccttggcccagtacacagctgggaccctggtttggagcagggctggatgggggtggggcagcaggacagagcatggtctggaccctggtttggagcagcaggaaaggacaggacatggcctttgggtgccacctgggcactctgagcctgtggtgtacccagcaggctcctcctcccaggcctcagcctccaaccttacccaagggaaactcctgtacagccgttgtggggttcctagggctcagccaggccagggaccaggtccctagagaggcccagtccctgcaagtgtccttctctgcccatagccatatggaaaagagagagcccaccctacttaccttcctcagggagagcctgtctgtccctgggagacttccctgacctcccagcctcatggttgagtccccggcttccttccctcgtggctccctgggcagagatgagacctgtctgttctctgggctgggctctgtcctctcctccccctgctctgtctgtctgcagctctctgggctgggtccgtgcaccccagctccaagggcctctatcaccctccccgccctggactccatctctgcttttgactcctgctctgccttacagggggcccttcccattcctgtggggtgggtatttcaccctcatccctgaccagacaggactgtgagctccctgtggggaactgtggctgcttcatttctgtccctccccagcccagcatggggcccaggggaaactggagctcagtaaagacagatgaaggaatgtggaaggcaccagacatatgccaagatccatactggtttcccaaggcacagacagctgggggttacagcaccatcctccatttgggccagcagggcctcatgggtgaccctctcttcctccctccacacagaggccacctcctggcccttgtccatctgaggcttccagaagtccagcttgttgaggcagccctggtttcaggggttctggggtcacttctctctaggagccagggcaggcctcaaccccatgtccagggcatctcaggccagctgtgaccagccgtggcaggaggtcctacagaagcccaggcctcctagactctgtgaacgtgtggacagcttcccttggctcatgtgatgacctgggaactgatgagaaacttcccacaggtgggatcacacggcagtcacatgctgaagtcccttggaggttgggcctgtgtctgagccccagggctgggcgggcagggagcacttaagggagcacttattctcctgccacatagctgccagaaaccacaaagcagcagcagggtcaggagcagggccggcaggacctggatgattagtgggttgctagtccagccctctggttgacttgcctcctgtgatggaccagtgtcctatgacggcagatgggtgctctctgatgaacaagtggtctgtgatggacgggtgctctgtgatagatgggtggtgtgtgattaatgggtgctttgtggtgaatgggtggtctgtggtggatgggtggtgtgtgatggacgggtggtttgcggtgaatgagtggtctatgatggatggatggtctatgatggatgggtggtctgtggtggatgggtggtgtgtgatagatggctggtttttggtggaagggtgctctgtgatagatggatattctgtggtgaatgggtggactgtggtggatgggtggcctgtgatggatgggtggcctgtgatggatgggggctctgtggtgggcgagtggcctgtgatggatgggtgctctgtggtgaatgggtggcctgtgatggatggctggcctgtggtggatgggtgctctgtggtgaatgggggctctgtggtgaatgggggctctgtggtgaatgggtggcctgtgatggatgggggctctgtggcaaatgggtggcctgtgttgaatggctggcctgtgatggatggctggcctgtgatggatggatgttctgtggtgaatgggtggcctgtgatggatggctggcctgtgatggatgggtgctctgtggtgaacgattggcctgtgatggctggccagcctgtggtggatgggtgctctgtggtgaatgggtggcctgtgatggatgggtgttctgtggtgaacgagtggcctgtgatggatggctggcctgtggtggatgggtgctctgtggtgaatgggggctctgtggtgaatgggtggcctgtgatgaatgattggcctatgatggatgggggctctgtggtgaatgggtggcctatgatggatgggggctctgtggcaaatgggtggcctgtgttgaatggctggcctgtgatggatggatggcctatgatggatggatgttctgtggtgaatggctggcctgtgatggctggctggcctgtgatggatgggtgctctgtggtgaacgattggcctatgatggctggccagcctgtggtggatgggtgctctgtggtgaatggatggcctgtgatgaatggctggcctgtggtggatgggtactcagtggtgaatggctggcctgtgatggatgggggcactgtaatggatgggtgctctgtggtgaatggctggcctgtgatgaatggctggcctgtggtggatgggtgctctgtggtgaatgggtggcctgtgatgaatggttggcctgtggtggatgggtactcagtggtgaatggctggcctgtgatggatgggggcactgtaatggatgggtgctctgtggtgaatggctggcctgtgatgaatggctggcctgtggtggatgggtgctctgtggtgaatgggtggcctgtgatgaatggctggcctgtggtggacgggtgctctgtggtgaatgggtggcctgtgatgaatggctggcctgtgatggatgggtgctctgtggtgaacgactggcctgtgatggctggccggcctgtggtggatgggtgctctgtggtgaatgactggcctgtgatgaatggctggcctgtggtggatgggtgctctgtggtgaatgggtggcctatgatgaacggctggcctgtggtggatgggtgctctgtggtgaatgggtggcctgtgatggatgggggcactgtaatggatgggtgctctgtggtgaatggctggcctgtgatgaacggctggcctgtggtggatgggtgctctgtggtgaatgggtggcctgtgatggatggttggccagtgacagatgggtgctctgtggtgaatgggtggcctgtggtgaatggctggcctgtgatggatgggtgctctgtggtgaatgggtggcctgtgatggacgggtgttctgtggtggatggttgctctgtggtgaatgggggctctatggtgaaaaggtgacctatggggaatgggtggcctgtggggagtggttggcctgtggtggatgggtggcctgtgatggatgggtggcctgtgatgaatgggtggcctgtagtggacaggtagtctgtggtggatgcatgttctgtgatggatggatggcctatgatgaatggatgttttgtgatggatgggtgttctatggtaaattggtgttctgtggcgaatgggtggcctgtggtggatgactgttctgtggtggatgggtgctgtgtggtgaatgggtggcctgtggtggatgagtgttctgtggtggatgggtgatctgtggtggatgagtgttctgtggtggatgggtgctctgtggtaaatggctggcctgtgatggataggtggcctgtggtggatgggtgttctataatgaatgggtgctctgtggtggatgagtggcctgtggtggacaagtagtctgtgatggatgcgtgttctgtgatggatgggttgcctgtggtggatgagtggtatgtggtggactggcaccctgtaggagaaaggtattaacacgcactacacctggtagacaatgcgaatgtcagtggcctgggtggcctcttcccagtgcccaccatttggaggcccatctgcccactcctcattctccctagctggtccctcctccatgtaccacagtgaggctagcagtcagggctggtccccagagagctacagacccctccttcggtcctgcttaaaggctctgccctagagccctgccaagaaagtcccagaagcttcctggtctcatgaacctagcctcactgaacacctcgcttgcagcacagggcttctgtgaggaccacaaaatctacaggtacaaagacaggtgagggtgggggtgctgtgtccaagagaggtgcaggcgcaggagcaggggcaggagacccgggtccatcacccacagcctctctccccacttccaggctctgcaccgtgggcacatccgtgcaccgctctgagcctcagcctccacacttgtgcaaagggaataagccgccctccctgggggcacttgtgaggtttagagagctcagaaaaaggcctggctcagaaccagggccacatggggtgtaagcaacgggaactcttccctgggtgttcttcacagtaaagggactttgggcggcaaccttgggaatgcaggctgcccagggcttccccaaatccagacttctgcttagagagaaggctagggagggaagaggagagagctcgtgctgggcctgagcctggcctgtacgcctaacagcctccccatcggcagcaggagaagacatactgcagggctcagtgagggagcagagagggacagctccggggcccaagcaggtaggagggtcagaaaggaggctgacagcatctgggaaatgacagcagatgaccaccaggcaggctcgggcgacagggttgtgagtgggtttaggatcatatcagcagctggggcaccggttcagcggcacacgcatcctgaaggtagtgcgtggaatcctccagatcccctggacctgagaggcccacgtggagaaggtggagaccctagaggtcctggattctggctcctggcacacagcctccaatcctcatccaccagtgccagctggaacaggatcaagcaggcccaggtgcctgctgcacacattacttttctgggactgcctgggaactgtgtgctctttctgtcctccccagggtgtatctcattccagtgcagggcctctggacagcccaggttggtggcatccccaccctggtactcacacaggtggtgctcttcatagtgatgtcattagaaaggacatttctgccattgttcaggctggcttcaacaaagacctccttaaagcacagaaagcgaagatggtgagagccagcccggagagatgcagttcttgcccttggtgagtagacagcatgggtaatgctctcattccccaaagcactgaggtcaacctcagcaacaatggccaagggggatgtgggtccagcagcaaggggccctgcatgagatttcatgtcattgtgactgtgtcctaagtgaccacaaatggctgcttggtgtcaaccattctggctcttctgtatttacagagtccattggcttaactctgaaaggcgacctggagcaacggtaccattcctcgggcaatcatctcctgcatcctgccctcctcacagaccctaggacactgcagatccctaggacactgcagatccctgaacaccttgggggccaccaacaagggaggtgagcaatgtgttctcagcccagccgcagacacgtgctgccccagcaggggggcatccacattctgtacacctcacagtgcccagctgtgacccctggcctcctgccctctagagcctcctgccctctagagcctcctgccagggatacttactgtccaggttgtttttaatctttggtccagggcaagtcatgaaagtcttgtccatactgattgtttttttttctaaaaggaaatgacatgggaagaatgtcgatgcacatgttcgtccactgttcctcccacctccggtcctcatcacgcagagcggaccctgtggtccacgactggcatctgggctctgctttcccattgcagagacccctgtgagcacccgccacgcccaggccctgtgcagcactctgatgtgtaacaggaaaggcaggcagagtccctgctctcaaggactcacctttaaggactgcatgggagacagacaacaaaattaaaaatagagaacaaaatagatggcagagtgcaacgtgctgtgatgtccatgagcagagggaaggagaggcacagagagaaagggacagccgcttcgtcacaggcgaccagaagcattcgtgtgatgttccacagtttcttcaatcccatttcattttctttttcttccatcatatttaagcaaaattaaatttattatgttgtagttgaaaatgttaatagcacttgtctttgggtttgggatttggggcaatgtttttattcattatgttttgtctatgtttcttttttctacattgtatcatttttataataaaatataattaacactttaaaaataattgtacatatgtataacaaaatataatactataattttataaattaaaatttcatgtatacataaaattactttctattgtttttctctttttcatgtaggtcagggttactatggacaaaatgactcatttccacatggaacaatttgttgacctgaacacaatggtcagattagccatgaatttctaaactgttgacctcttccttggtgctgataaagataacgatcaggaaacagattcactttgagagatggaaagagtgggattactggggtaaaaatccccaagatgtgtgacctgactgcagaatggcattcaggagagctcagggagctcctggggagggcgggtggcactggcaccctgaggccatggctcagggtcaagatgggcagagggtccagcaacaccgggctgctgggaaaagagttttcaaataggttaaccgattaaacccatacttcagtcaccatattaaaaaatttcttaaatcacaaaaacatagcctataaagacagaaaacatgaagcatatagaaacatcaagctttgaatatgtcttcttgcttccctatttctaaaatgtttctcgaatgttttcttcagaggaaaatgtaattaatgacaaagtcactcctcagtacatccgagctccctgcaacaggcagccatgcccggccacttctgcaaaggcaccaaccaggagcagggtggccatctgcagaggtacccaggactgtggcatgggctttcctatgtgagacctggtgctggcccacattggagaaaaaactagtgccctccaggaaaccagtgcacccacaggcgggcagaggaggcatctgaatggacttcctgggggtaggcagggccatgccttccccaaaaaccatcatctcagggacgcagaaggcccccactgggcagatagatctcctgggtctactctccaggtgtgtggtgctgggaagctcttccatcacccctgccctggccatccacccatgcaaaggaaatgcagtaaggctgctttgagaattcatggagatattgagtgtgaggcacttggcacaatatctgatatgagaagcattcaatacccggtagctctccttaggagggggctgctccatccctaagccactcccacgaaagtatacgtcagtggaatcttaatggcctgagaccatctacacaactctgccacatgagaatgtgacaatgacagcctcttccccattctatatactcagggacaggaggagagatggctgagaagcatcctgcagggagaggagtcattccaagtttactagatgaccctgaataagaggccattgaacataacatgatcagatggaatgaatgtaacaaggggtcaagaggaagaattgagggggatgcagaaaatccaactgcaccccgggcactcagcggggaagagcacactcgctcaggacccagggcacattggctgcctagactgtgcgcttcctcaggccactccccaattgcagaggtccccggatgcctgagtgttgccaaacaataggagagtttaaaatattataaagtccatacttgtgccagctgctctacacaggtgatcttgcttagttaggttgagtatccctaatctgaaaattcaaaatccaaagtgctctaaaatctgaaattctttgaatgtcaccgtgatgctcaaaggaaaagctcattggatcatttcagatttcagaggaggctacttatcaatgactttggctttgctgaactagaatctgcaaataacttggtcctggctctttgcattattaaagtcatatccgtgaataatcacttgcttggattctgcaagaacaacactcaaaagtctgagtgaggaagagtggagggctctctccactctgacctccctgctcctggtgatccatccccaaaactgaattcccagggggcttccctacaaggaagtggctgtgtctgaatgaacatctgtgtgtccactggaccaaatcctcatctggtgtcactgagggtccacaaggaggtggttgggccttgagcccacaggaggactcccacacccttcctaatccaaggaacccaggaaaggcaccctgcctcagcctctgcacgggggcagttcagctggagctttccaccctgaaatcctacagtgctccctcaggccacaggggtcaagtccttgcagtcctgagcagtgttgtagggctgacaacttaccagaagggcaacaggacacagatagaagtcacctgtgctgggggtggcggtggggactgggactcccgcacactgcttggtatggcctcctggacagaaaagcaacactactgaagaacgtttcacaagtgtgtgcccttaatgcaacaattccacttcttgtctcaatcccagggaactactgagccacatgcacagagaggtctgaggggattttctgggggccatagtaacattccacatcttcacagggtctgtggttacacagatgtgtgtgctcttgtcaaaactcatcagatgacacacaagatttgtgcactgcaaaaagagaacttaataaatattgttccctagttaaagatatacgaactgaagggtttaggggtaaagtaccctgaggactgtaaaatattttgaatgcatccaaaaataagatgaattggtggagagaaagagagacagtgagaggaagacatgcatagagacaggataaagcaagcatggtcaagcattaattaaaaatccccacgatggaaacaggcgtgtacattgcacaatcctttccgcttggctgtaaagtttgaacattttaataatgaaaggttagaagaaaaacaaagaactaaataagaaaattatgtttggacacacacaaccagaagtcatggtacatcctgggtgacaagtgactgatgagagggacagaccaagcccttggactgcaggaagtcagaggggctggtcatcagggaaggcttccaggacaaggtgcccttcgagcagggctgcaaagggcaggtgggctcggcctttcaaggtgaggcagggcttgcagagtgcctatgccccacctggtcccacctctgcacagggtgcccagagcagggagtggcccctggagggcctcactgctccaggctggtccttagcccagcagaggcctctgccaggctggatatgaggcccagggctgaatgggggagtctgggctgcgtgcctccctccctgggctccttcctgggctccctggagtcctcatggcttcttggtagcagcctgctgagagggctcattctgttgcatttgggttccaggctcctgccttggcctttccctgctgtgactgtcaccttccatgtggggtggctttgtacaattggccaacagctgacaggtcagggccgtgactgccaggccacatgagcagaggcagagggccgagctggtgggcagagggcacctgtcacctcgactcggctgcctccagtgaggggtgacgactcacatcctcacctggggttgacagggctgctcagatgccacagcctgtgcatgtccaggggacatcatcagaggagcgcagctgtcacactgctgcacggctgagtggctttaaaccaggaacagcagaaagagaccccgagggggaggggagctctctctactccacccccatcctcagctctgcatgggggagaggcggggtcggggacagaccccaggaccaatcatggaagtgtcagcacagcccctatttctgggacctgccagctcgcagccctgtgccagtccctgcacagcccagtgccctgggactcacgacaggcctgacagcgtcctttctgttcatgtgaggcacctctggagctcactggaattggactattttctcctggtcatgtgcccgtggagagcagagctcagacatggaccatgtgtctgtccccacagcctactgccagggtgctctgcagtaaggaacacggatgccagagcccagctactggagggcctggtggtcttgctaagggcctcatgctgtacccctggagggaggatgcccagggctctattcctttgcagcagctgcagttgtacaaacgtcagccattcagagccccagcctacacagacagaactcaagacagacaggggtcatcacagaggccctcacagggctgtctccacacatgctgggaccctggctggcaagaggacattctctccacatcccagacagcagggatgggtgctgggttttatcctttggggccgaggagaaccaagggtgtttgtgtggatggctttttctggttacggaggtttccttttgttcccaggaacagaaggagatgttgacacccccacttcttgttcctcatccccctgagaaaattgcctggttcctatttcccgttttgttgatgtggtaaattacacagatatttcagctcctacgcctgcctgggattcctgagatgaaccctgactgctcccggcctatgggccgggttagctgctgtgcatgcccacaccacatacacacagatacaacacccacaccacaaacacactataccacacacaactagcacacatataccacagacacaacataaacatactgtaccagaaacatccatgatctaaacaccatatacataccacacacaccacacaccatacgtgatgcacaacacacactcacacagcacatacacacgcacaaacaccacatgcatccaaacgcaacttccacagcacacacaccatactgcgcacattcacacaccatatacccactatagccaacacacacatcacaaaacacaccacacacgccctatgcccactatagccaacacacacacatcacaaaacacaccacacacgccatatacccactatagccaacacacacacatcacaaaacacaccacacacgccatatacccgctatagccaacacacacacatcacaaaacacaccacacacgccatatacccgctatagccaacacacacacatcacaaaacacaccacacacgccatatacccgctatagccaacacacacacatcacaaaacacaccacacacgccctatgcccgctatagccaacacacacacatcacaaaacacaccacacacgccctatgcccgctatagccatcacacacacatcacaaaacacaccacacatgccctatgcccgctatagccaacacacacacatcacaaaacacaccacacacgccctatgcccgctatagccaacacacacacatcacaaaacacaccacacacgccctatgcccgctatagccaacacacacacatcacaaaacacaccacacacgccctatgcccgctatagccaacacacacacatcacaaaacacaccacacacgccatatacccactatagccaacatacacacatcacaaaacacaccacacacaccatataccacacatgcagcacatacccttcttactacagcggggcctcctcagtgctcacctcctgcacacatagtggaggctccacagacttcacctcaagacaccttgtgttccgatctggaatagagagcgaggtacaaaggggcagggagtgtgagcctcagggcacaggagccaggcccccaccacctctccaattggccccactcactctgtccactaggccatgctgttcagaaactccatgacccactgcaaacatgcggtccaggctgtgggcaattgttgttatcttcagagagggaacgtggcttggacccccacccaggaggtgaggatgcagcaggtcacaggctcaggggacagtgtcttgcccccatgctttgggggcagcagaatgtcaggctgtcagggccacagccttctctagccagcagcccactatcagggagtggggaactcttccgcccccgcttttggtgtggtgggatttctacaacacgctgtcagtcacttctgcagtggccatgggttggcccaaatcacttgggggcaagttagatgactgtccttgtggtggccctgggaaagccgcctgggatgcctttctccactcagctccagagtggtgcctggttactagttcagaatgacctggcctatcttataatcagccacacccagggtgtaaacggtggcccccaggctcccagcctttcagcctaagggaaagaaggcattgagcattagtcatcaaaataggtggagcaaaatgctggtaactgtgaacccagctggcttctttgagagtctcctgaaatgcatttgaaggtattgagtattagtcatcaaaatgggtggagcaaaatactggtaactatgaacctgactggcttctttgagagtgtcctgaaatgcatttggcacctgtgctccactggtcatagcaataatcgtgctggtaaccttgttgtctgcagaagaagcaaggagtgacctgctcagcaaaggcatcaggagtgacctccagaagctccgggacccctgcagttggctgggcccgcagcactgctcattccaaggcatggccaggtgcccccacctcatcctccaggggagaggctgccaagacccaagcacctgccacccagagacccctagagtgatgcggggcctcagcctggtacccattttacagaggagggatggagaggggcagggcccttcccatcactctgcctgaaccctcacccactagcagcctgcaccacttctgcctgagggcagctccagccagagctccacaagcacaggcctgtcccacaggcagggggaggagcagccgggcagtcccatgggcagagcctgcgggcagccctgccaacatctttgggcccaggagttcaggactccaggtcagtggcacctgggcaggggatcccatggccacctcaatgcctttccccacgagccccgcctcttcctgacaagacctgcagccccacagtggggaagggagtcgggggctgtggacagccttctgtaccatctgagacacgatcaggtgatgaaagtcgcttgaaggggacacgaggaagggaggaggaagactaaggtgtgtgcaagggggcaaaccccttggctcttctcttccttttcacacagcccagctggagggcaagcaccaaagggttatgagcaccagaactgcacacgcaggatcccacacagttctcagaactccatggaacgggggattactatgctcattgcacctgggagggcacctggagctcggagcaggtgagcaacttgctccaagaagcagggcaggaatctgcacacagagctctctgaggcccattcccagctctgttcaccctatgggaccaccatggggatagcaggagggcttacctctggagttgacacattgaatctactaatttgcttgtaaggaaatgaagatgttctaagaatgcacagtgaggcgaccccagtaataccctaagagcatgaggaactagaacacattctgtgagctctagtggtctgtaccattttacctccttcctgcatgaatgtgtgtccatgagactcaagatcctctgttaaggtaagatgttcatggattgtttttctgagaaaaataaaaaaaaaaaaaagattgaggtggagagggatggaatgttacaaaacagctcccgagctctcctggagccattgtctactgtgaagacctccctgaatggaggagggtgccaggcacataccttatcatgctcattcatcgctgtgactttgactagagatatttttgttttctctgtctctgatctggtaagcatagtgggagggagggtgtggggttaggggctgcttagctggtaccctgggtatagcctcgctttccctgagctcatgcctgtctcagggcacttagactttggagagctcataaaggcccagcatgaaccctccatggtgaaatgggagcatcccatagatgtgtgactacaaatcaggcccttccaatgggaccagctttcttaaccctaacccctaacccttaacccctaacccctaaccctaaccctaatccaaaggcatgcaactgagattcagggacaggcaatgggactggcattcctaatcttaactctaatcctaatcctaaacctaaccctaagggcttcccttgtgttgggcaacgtatccttcaaaaggcagggctgagttcggaaaaggcatcctgctaagcccccagccctgcacccagcacccacaactccagacccctgaccctgactcaatctcctccactctctttatcctaccaaagtagcaaatctgcttaataagagtgctatggctccttgacttcctgtgctcccgaaaccaaaagaccaaaggctgaaagaagcggccccaaagggtgtgcaggcagctgagcacggcaggctggctcggggatgtggcctgtcagcctctgttaaagcagacaggactggttgggccaggcagagctggctctgatggcaggactgggacaggctaatccaatgtgacaggctgagccagcacagcaaggctgggccaagcatggaccctgaaggctggcttcgcactgcaggaagagagtccctgccatgtgggggagctctgagagcctcagcccaggagggaaggaggccaggccctgcccagcccctgctgcccctctgggccaccacccagagtccttccccgtgaacttgctttcttcgccctcatgcccacctaggtctccctctcccaaacccacagcacattatgcacaaactcaagccttcccccagctcagggagcagaagccccgtcccagctcttcctcaaagctgtaagtggggcccaggcccccatccagtcctcaggatcctcggctctcttctgtgcttcaccctcttagtgcccagttccaggcatttgcatcagaagtgttcttacctcctgccaatcaggagctctgcagtgcctcctgctgggcctgggcacccctctaggccaactccagctgcctgagcttgctcctcctgccttcctccagctccccagcctggcctggggctcaggaccccacccatggtctcccctgtctgagacccaccaggggaccaagctcttctgcactaaactctccagcactcccccttaccctgaccctgtctccctcccatagagaaggccagagcagagaggggcacacagagagcagcagccagcacaggcaggtgttcacaggacacacacacctgcccaccagcccccgcactctggggaaggaggtagggcagagggaggacaggggacagagaaggtcagggaggccaagaaattcgggagcacaggggctacaggtaacagtgcaaccaggggtcagagggttcaggggaacaggcattggggtcagggtgggtactgtgagatgccctgagcagcctgccctgtgtgctgtcaggctcccaaccaaggtctcagggagccccacagctctctggagctccctctggcccagcctctcaggcctccgttgggggctcaaagcagcactcccctgcctggggtgaatgtgagctgtgggacgatgctgccctccgtggagtaggtgatgaaagacagctacattctcaggctggggaggaagcacatggccctgagaagccagaggcactggctgcactggacccaagcatagccagggcggtgaggcccactccccacctcccaccccaactcttccatcttggggccccttgctggacacagggaagtgagataaatgcagtggactctgaggcctgtggagacgagggatccacaaaagaaagtcaggatggcaacttgctgcatccccacaatcccaacacaccccaaagaaactcaaactcacacacaccacgtacacatacacacacatgcacgcacacacatgcgcaaacatgcatgcataccacacacacagtcacacatggacacacacacacaccccccatgctgaacaagtagggagatgcacacacagccctcccagctggcctcccttctactggaaaattctttgcctcttcaccccattccctcctccccctcctctccctcattcctccttcatcccagaggagtgactcatcctattggcagccatgcacacagccttcctttcctctccctgaccctccttcctgccggctggccctcagtggccctcagcgacagtgctgccatacatccccagcggagctccccatggatcctgcccttgttgcccattcattttacccacagtcatcagacttttcttccttaagtgccaccttgatcatcccactcctctgctcaagagccttctctggctgtctatggctcacagcaggaaatctcagctccttggcctggcataatgagcccctgtggctttggcctcaaactgaccttcccagccctctcccagccctgcctgagctaacctcattagctcagcaagctaagccaagcaagaccactcactccaccacaggtcccctgtggtgggaaatatttcaagttttgcagggaaaatgtgaggcttgtgaattaagtgttttgtcttttccatcctgcaagacccagttcaaagacccacatccctggaagccactcttgactttgtcgttaggagttcctgctttttcctttaaccttccatgtgagttctttgtccctttccttgaaccctcggcagtgcataacccagggttccgggactgagtcactgatttacctacctaatgtcccttcccagcctgcgatgtccccaagggcaaacttggggctcaagtattcccagggctcacaggcaggagccagccaaggctgccgagatccaatggaaccagtgagcgctggcctcattcctgtttcagaatgccactttgtgctctgtgtcccccaccgaggaactcccacgcccacccaatctgatgggttgtgctttctacctgccagaggaaaagcttcctgcagtgcagggaaggctgcagcctcactttacttatttctctgcaatctcttctgtattgcagagccataaaggtcaaggcaggaatccaggctgctgggcctgaaaacaaaggagacctgtgttagggagttgaggcgcatctgtctggtgggcaggtgtctgtccactccagcctcctagcagtctcttaacaagctcccccgaccccagcagagctttggctggggtacacccccagcaaccacagtggatcatctgggtggtgactttcattagggtgaccacccagacctgtctgtctgggaccaacaggctttcagggatgaggtacattttttgctaatagttgactattaccatagtcagctgactaggaggatagctgactggttaccttagctgggggccgtgtagataagaactgtgggaggatgtcccagctgaaaagccctgagcaattctgatatgctggctctccttgctcccacttacccggggggtttatccatccccaaccatctgtgattggatagggcagagctcttgggaatcacggtccatcagacgccccttgagaacaacagacccagacctggtccatcattcctctgttggactcttggattcttggacatcagaccggacccttcggttggggatccttctggcagcctgtgtgtgacctgctaaccctattcatgacacctccagatcctgctcactgtcccacatttcccagcacccacagagggaggtagtgacattccctgtgggagcctgggcctcaggcaagggaggatgtgcactttgggccattttgcctcccatatttcttataagcttgcaaagccaagccgctctgggcatggagagccttctccagcagacaccactggggagggaagaagcacacctggccactgctgtcctggcgtcatcatttccccagcatcagggagagccacatgcccttattgtcctgacttccagatcttactgctaatattctcccacttagtccccagacacagagtaaggagcttgaagggggttggagccttgtgagacttccatctaggtggggatcaatcacatctgccctacccgcccaagacgcaaaggtctttgcaatcccacagctccatcggtaggtacagcttggcagaaatgggaaatatttcaagttttgcagggaaaatgtgaggcctgtgaattaagtgttttgtccaaggtcctggagatggtatcagttaaaactaaggctggtgccctcatctgagtcctttctctgtatctgtgttgctttatggtcttttgtgtattatgtactcaggggagcctaccaggaggctcttctcccctccagcaatgaccatgtctataaatgtttgcctcctgaacatcatgcttgtatgtggtagttctcatgcatccaagagcagccttctcccctccactgttccactgcctcctctagcctgcatctaaatctgcatactgtattattttcattttacagatgaaaaacttgaggctctgaacggtcaagcaatttgtcacaatttccatagctgtgaggcgcgtctgtctggtaggcagatgtctgttcttcctcacctactccactgggactggggtcaggggggctactgaccccaccatggaggatccaggcagggcccttcataagctctccaaagcctgagtgccctgagacaagcatgagctcagagaaagcctggccatacccagggtaccagctaagcagcccctagccccacagcctccctcccactgtgctcaccaagtgtgggatctgcactcacagcttgctgaggcccacacccagaggcagatgcaccaacagaggcaggtagtgacattcccttgtgggaacctggtcctcccttgcctgaggatcaagctccacagggaatgtcactgcctgcctccattggggcaaaagtaactacagtttcagactgtgaattttaaatcattataactaggctcaaagacatctttattaatcaaaacggaaaccattacaatcaacacatttttgccaatgagaaacaaatttgtttattcctgcagtgtaaaaatccatgctttgggattggacaaactcttggaaagcattttctgcatcctgctggttgtgaaatgattttccctgcaaaaagttgtcgagatgctcgaataagtggtagttggttggcaagaagtcaggtgaatatggcggatgaggcaaaactctgtagtccaattccttcaactttggaagagttggttgtgtgatgtgcagtccagcattgtcatggagaattgggccctttctgttgatcaatgccagctgcaggcattgcagtttttggtgcatctcaaccatgtgctgagcgtacttcttagatgtagcggttttgccagaattcagaaagctatagtgtatcagaccagcagcagaccaccaaaccatgaccatgacctttttctggtacaagtttgcctttggaaagtgctttggagcttattcttggtccagccactgaggtagtcatcactggttgtcatatgaattccactttttgtcacacgtcacaagcggattgagaaatgattcattattgtgtagaataaaagaagacgacacttcaaaatgacaattttttaaatttttgctcagctcatgaggcacccacttattgaactttttcaccattccaatttgcttcaaatgccaaatgactgcagaacagttgacgctgaattcttttgcaacttatcgcgtcattgtaagaagatcagctttgataactgctctcggttgttgtcaacttccaatggccagtctctatgttcctcatcttcaagcctcttgtctcctttgcaaaatttcttgaaccaccactacactgtacattccttagaagttccagggccaaatgcattgctgatgttgcaagttgtcttggctgctttatgacccaatttgaactcaaataagaaaatcacccgaattcgctttttgtctaacatcagctccacagtctaaaataaatataaaataaacagcaagtaataagtcattagcaaaaaacataaagtgagaaatgcacattaaaatgatatataacataaccatatttatttaagaatgtattccaatatcaaacagcaaattttaaaatgcaaaaatcagaatttcttttgcaccaacctaatagcatggatctgaacccaggtctagctgcaaaaccataatttacccattgcacttagggtgtctaggtgacactgtggtatcaaacgatactggaaaacaaagcactggactctcaaaactcatccacaacacagactttgcccttggcagctcccacactaacatgtaagacaacccctttcctaactaatgataacagtttccaatttccttctctttacactctactctctttttccttcagcaaaaagggtcttccagtgaagggttatggggagcaagaatcttcattccattcacccactctggtaaaatttccagtttgagatgattttgaagaagggtctacattttagaccacagaggaagccagtgctcttgggtggtgaagggccacatgaactgacatgtccccagaaggaggagaaggaggcaacatggaagagtgcaaactatgtgggcttctggcacacagagctctacttatgatttagtgccccagtcttacatgagaacagagagaccaggatcaccaaacatttgagaacacctctaccattacaatttgagaccaaaacatcatagtgatataaccacattgcagaaatggaagtgggtaggattgaatcctgtaggaaaactcagctatgagaaagctaaatactcttcccccataggaagaagtcaacagagaatatgtaagctgacaacagcaagaaacagcagtcagtacaagcatatttttaaaaacaaggacataaaaccagaagaaaaagctaaaacacttgcaagtggctgcttctggggagtgagatcagaagtgggaaagagtcgagcaggagccttgggttttttgtgtgtgtgtgtgagccttcatagagtatttgatatttacatttatcttcaagcttttcattaattaatgtaaaaatgaaattacaagcaaaaactagcagcatggaatgatgtcatcaaaatggtggcttaaacactccaagcccctgctcccccatagaaacattgaaagaaaaaaacagaatctgtgtgtgccaacttttcagggactcaggcaaacagtaatcaaagatttactgcaatataccaggtgcccaactgagaaaaagctaccttcaaaatcacaggaaagttttgtgatgtttttgtgggggaaaggaagacagatcagactgttattgtgtctatgtagaaaaaggaagacataagaaactccattttgatctgtactaagaaaaattgttctgctttgagatgctgttaatctgcaaccttagccccaaccctgtgctcacagaaacatgtgctgtattgaatcaagatttaatggagttagggctgtgcaggttgtgccttgttaacaatttgtttgcaggctgtatgcttggtaaaagtcattgccattctccattctcaattaaccagggacacaatgcactgtggaaatctgcagggacctctgcccaagaaagcctgggtattgtccaggtctcccccccactgacacagcccaagatacggcctcgtgggaagggaaagaccttacagtcccctagcccgacactcgtaaagggtctgtgctgaggagaattagtgaaagaggaaggcctctttgcagttgagataaaaactctcctgtttgtccctgggaatgaaatgtctcggtgtaaagcccgaccatatattctatttactgaggtaggagaaaactgccctatggctggaggtgagacatgctggcagcaatactgccctgctactctttactgcactgagatgtttgtgtaaagttaaacataaatctggcctacatgcatatccaggcacagtaactttccttaaacttatttatgacacagattcctttgctcatatgttttcctactgaccctctccccaccattaccctatagtcctgccacatctccctcaccgagatagtaaagatagtgatcaataaatactgaggaaactcagagaccggtgctggtgcaggtcctcacttgctgaacacttgtcccctgggcccacttttcttcctctatactttgtctctgtgccttatttcttttctcagtctctcatctcctccttgtgagaaataccctcaggtgtggaggggcaggcccccttcacttttcacatatcctttctgcaacactttcacagcatattggcagttttggtcttgagcagtgacccagttccaagtgattgtctatgaactagagggagcagcgtagctcttacttgcacatttctgtgtatatctgttctaacctggctggaggacacccaaaagactagctccctctactctatctcatatagctcagtcagaacacatctagaaaatgtggtaagcacttcttgtaaaagtgatgacaaatctacaggggacaaaaagccccatagatgcctgaggcaagagagtttgggtgaatacacaatagaccatcaaaggcccccaggagaagctaggtgtgactctttgggaactaggatgtttaggataagctgtgtacacaggggaatttagaaagtcatggacatgcccaggcaagatatgtgctcagagaagtccacactttaagctttccatagacttagagcaagtctagttaagttgtgaaggagtgcccagaacaaaaccaatctgcaaagacaggaatgtggctgctctttctgttaaattttttagtggttttccttttgtcttagctcctggcattcaaagaaatctgtcaaaacatcacctgaacatgaactacagaaggaaaaatttcagtgatcctacacaaccaggaatggcctttgtaaaaatagtctgaaaaattttcaaaatgaacaaactactacaggattttacaattaaaaaacaaaaaacaaaaacaaaaataatccattaacttatggggaagtggggggggatataatttatagagttactacattataataatcaaacacccaactttcaacaacaacaaaaacaaaataaaaaacacaagacttaaaaagaaacagaaaaacatagctcattcaaaggaactaaataaatggacaaaaactgcccccaaagaagccaatattttagacatactggacaaagacttaaaatatctatcttagatatgctcaaagaggtgaggaaaaacaagaagaaagaaataaagaggcttggcatggtggctcacacctataatcaatcaagatgggagaatcgttaattgcaggagtttgagatcaccctgggcaacatagtgaggtccatctctaattaaaataaataaataactgggtttggtggtgcatccctctagccccagctacttgggaggctgaggtgggaggattgcttgagcctgggaggttgaggctgcagtgaaccatgatcatgccactgcatttcagcctgggagacagaatgagactttctctgaacaagcaaacaaacaaaaaagaaagaaaagagaaataaaggaaatcaggaattactgatttgtttaaagaactgaaataaaaaagctattaacaaagaattccatgttctgcaatactgtcttctaaaaataaggaatatatttgaggcattaacaaataaaagccgagggacttcattaccacttgtcttataagaaatgctaaagggaatctttcaggtgaaaattcaagggcactagacaatagctggaagccatatgaacataggtttctggtaaaaataaatacatgagaaaatataaaagtcagtaatattgtaatctcggcttgtatctctattatttttctatagaatttaaaaggcaaatgcacaaaaatcattataaatctgttattgggcacacaaaaccttgataaagaggggcacaaagctgtacaggggcacaaagctatactcaactctgctgtttacaattaaagttaagttaaagttgatagcaactcaaattagatagttataactttaggatgttacatgtaatcacacgtaataaaaaaggaaatatctataatatgatataatacaatatacacaaaaggaaataagcaaggtatcaaaatgtgtcattgcaaaaaattacctaaacacaactgaagacagaaatggagaaaatgaggaacaaaaaatctagaagatatacagagaacgaatataaaatgacataagtaagttcttccctatcagtaattcatgctccatctacatgctgtcaagagactcatttcagatctaaaagcacaaatatgttgaaaattaaaggatggaaaaagacattacatgcaaatgaagaccaaaagggagtgaggatgctcacagtaatattagacaaaatggaatttaagttaaaagatactggcataagagacaaagaaagactgatattaataaaagggtcaattcactaagaagataaaacaactataaacagatatgtaccaaaaatcagagctatgaaatttattaaacaaacattgacagaattaaagggagaaataggaagacttacgttaatagctggagacttcagtaccctactttaatcaggtatagaatcagacagaatgtaagaaaagatagaaacaagaaaatagaggacttgaacatctcttttaactgagtgtacctaacacacatatacaaaaccctctgctcaaagatagcagaatacatgtttttctcaagtgcacatgggatattctccaggatagatcacatgttaggccacaaaacaagtcttaaaaaatctagaaagttttaaatcatacagaacactttttccaatcacaatgtaataaactagaaatcaataccagagggaaaactaaaaaattcaccaatatgtggaaattaaacaaaatgctctcaaataaacaataggacaaagaagaaatcacaaagaatattagaaaatacaaatgtttcttggcatacaattggggtatatcccattaaacccactgctaattcgaaaagtcattaatggaacaatcataagttagggacagtctgtaccttgagattaatgactatgaaaacacaacatactaaaacttatgagatgcaaggaaagcagtgctaagagggtaatttataactctaaatgaataagttagaaaagctcttcaatcaataaactgactttacatcttatgtaactagaaaaccaaaagaaaattatacccaaaaatagcaaaggaaaaaaaaagattacagcagagataaatgaaaaagagaacagaaaaatagagaatatcaatgaaaccaaaagtttgtgtgtttttttttttggaaaaatcaacaaaattgacaaacttctttcttggatgacttagaataaaagaaggattactcaaattactaaaatcagaaaatgagagtgggactatgactaccaatttaacagaaataaaaaagattataagcacataaaatgaacatctgtacaccaacaagtggaattaaatagataaaatgttttttatgaatttgggtgttcttaagaatctgggtgctcatgaagaatattttgctctttatgaatctgggtgctcataaagaatatgatttgattttgatagactgtgtgtttctaggaattatcccatttcatctatttaattctatttgttggtgttcagatgttcctagtatgtcattataaaatttttcattactgttaaactggtagtcattttcccactctcattttcccactctcattttcagaaataagactgcacacctacaaccatctgatcttcaacaaaactgtcaaaaacaagcaaaggggaataaattccctatttaataaacattgctgggatagctggctaaccatatgcagaaaattgaaactggacccctttcttacaccttatacaaaaattaatcaagatggattaaatacttaaatgtaaaacccaaaactctagaagaaaatctaggcaataccacttggacataggcacgggcaaagatttcatgatgaaaacatcaaaaataattgcaacagaagaaacacttgacaaaagaagctatcatcagagtgaacagacaacctgcagaatgggagaaaatttttgcaatctatccatctgacaaaggttaaatatccagagtccacaaggaacttaaacaaatttacaagaaaaaaacaaccccattaaaaagtgggcaaaggacatgaacagacacttctcaagagaagacattcatgcagccaacaaacatatgaaaaaaagctcaacatcactgatcattagagaaatgcaaatcgaaaccacagtgagatactatctcatgccagtcagaatggcaattatttaaaagtcaaaaaacaacagatgctggtgacgttgcagagaaaaagaaatgtttttacactgttgatgggagtgtaaattagttcaaccattgtggaaggcagtgtggtgatacctcaaagacctaaaggcagaaataccatttgacccagcaataccgttactgactgtatgcccaaaggtatataaatcattctactttaaagatacatgcatgtgtatgttcattgcagcactattcacaataacaaaggcatgaaatcatcctaaatgcttatcaacgatagactggaaaaagaaaatgtggtacatatacaccatggaataatatgttgccataaaaacgaatgagatcatgtcctttgcagggacatggatggaattggaagctattatccttagcaaactaatgcaggaacagaaaactaaacaccacatgttctcactcataagtgggagctgaatgataagaacacatggacacatgagggtgaacaacacacactggggcgtgttggagggagagcatcaggaagaatagctcatggatgctggggttactacctaggtgttgggatgatctgtgcagcaaactaccacggcatacgtttacctatgtaacaaacctgcacatcctgcatgtgtaccccggaacttaaaataaaagttgatgaaaaataaaaaaatttaaaaaattgtgaagaaatagaaaatccgaacagacctataatagtaaggagattgaattagttataaaaacctctcaacaaagaaaagtccaggaccagatggcttcattggtaaattctgccaaatatgtaaggaaaaatcctttgcaaactcttccaaaaatctgtaggtgatggaacacttctaaacgaaatctataaaggccagcactgcactgatacaaaagccagacaaagacactgtaagaaaactatacaccaaaatcccttatcaatattagtgcaaaaatcctcaacaaaatactgcaaactgaattccacagtttattaaaagatttttatatccccaaagaatgagatttatttccataatttaaaaatgattcaacattaaaaaatcagtattatacacttcattagtagaattaagacaactacatgatctccattgataaagtatttgataacattcaatacctgttttgattaagacactcaaattaaaaataaagttcttcaacatgaaaaaggacatatacgaaaacacacagctaaaatactcaatgctgaaagataaaaaatgtttcccctaagatcaagagcaatacaaggatgtccattttcattgtgtccattcaacatagtatggaaattcaagccagagcaattaggcaggaaataaaaataaaaggcatccaaattgcaaagaagaggcaaaattgtccctatttatgaatgatatgatcttacttgtaaaaaccctaaagattccacaaaaaactgttagagctaataaataaatttagtaaagtagcaagatacaaaattggcctgcaaaaattagctgcatttctatagactaacaataaaaaataaagtgaaattaagataacacttctatttacaatagcacctcacaaataaaatgcttaggaataaattaagtgaaggaggcaaaaataggtttactgagaaccacgaaacattgttaaaagagtttaaagatagaattaaattgaaagacattttatgtttaaagattagaaggcttaatattgttagactgacaatactagccaaagacatctacagatttagtgtaatctttaccaaaatctcaacagcatttttgttgcagacatagaaaaatccaggtaaaattcacatggaatctcaagagatgacaaatactatcccttagcccctcaaaaaatcttcaaaaggagaaagtagagtaattgtgttttctgatttcaatatctattacaaagctacagcaatcaaaacaatgtggtaccggtttaaggacaggtatatagaccaatgaacagtatagaaagcatagaaataaacctttatgtatatggttgattgatttttaaaaaatgttgccaagactatctaatctggaaaaggacagtagtttcaacaaatggtgctgtaaaaactgcatgtccacatgcaaaagaatgaaattgggcccttactatacgccattacagaaattaacccaaaatgaatcaaaatctaaatatatgagataaaactacaaaaatcttagtagagaacataggaaaacacctttatgacattggatttgataataattttttggatgtgacaccaaaagcacagataacgaaacaaaaaagtcaaaaactgaactttgtccatgccaattacatttttatgcatcaaaggagagtatcaagaaagtgaaaagacagtccacagaatggaaaagaacatttgcaaattaagtatctgataagagattaatatccataatatataaagaactcctacatatcaacaacaaaaatcaaacaagtccaacaaaaattaagcaaaagacttaagtagacatttctccaaagaagatacacaaatgtccaataagcatgtgaaaagaggctcaacatcactagtcattagggaaatgccaatgaaaaccacaatgagatacaacttcacatccattgggatggctattatcaaaaaagagaaaatagcaagtgttggagagactgtagaaatattggacctattgtgcattgttgctaggagcgtaaaatggtgcatccactgtggtagacagcttggcagttcctcagaaagttaaacatagaattaccatatgttccatgaattccacttgtaaatatgtatatacccaaaagaagtgacagcagaaactcaaacagatatgtgtttgccagtattcatagcagcattattcacaatagcctgatggtagaagtaacccaagtgttcatcaacacatgaatgggcaaacaaaaagtggtacatatacatgcggagaaatattattcagccatagaaacggatgaaatttcatagatggcataacatggatatacctttaaaaccttttgctaagtgaaataggtcagatagaaaaagtcaaatattgcatgtttgtgtgaatatattgtataattccacttacgtgagatacctgtggtggacatttcatacatacgggaaagagaatagagattaccagggtttggaagagggagaaatgggtagtaattgttcagtgaatagagactttcagtatgcgaggatgagaaaattctggagatgcatggtgatcgtgatgggtgcaaaactgtgaatgtacttaatgtcaaggaattgtacacttaaaactagttaaaatggtcaatttaatgttgtatatattttatcacaattaataacttaaaaaacctaatagcatggattgtggatcaggtagacacaagttataagatccaagtttgaatctgctgaatgtctagggcatgctacttaacctctctgagccagtttcctcctctccccagggctaaacatcgtctccacccctacttcatggctggtggtaaagataagcgggaaatgtgggctggtacaggggaccccacagcacaggcctccagtgcacggtcactaggtcagcctgaaatcagaggccaggctgaaggaagtgagcaaggaagccagtaggtgaggaaggcgtggagactgaggacttgtcagcctggagcaggaaacattcctggggaacacaacagtattaagcaggaaaacaaaatgaaacaaaaaggaaatttcccgcattaataagaggacaatgaagcctatttattctatgatgaaggcccattttattacactcacaggttctgaggatcaggcactcagggcagagtggggagggctccacatgtctggagaccctgatgggaaggcttgagcagccggacatgacttgaaggattggatactgggatttctggaggatcctccattcataagtgtgggttctggcaggaggactcaaaagctgggctcagctggaactgtgaatggagactctgcatgtggcctccctgtatgacctgggcttcctctcagcatggtggcttaaaggtgcttgggctttaacaggtggcttagagttccaagagtaagtattttcagtgagcaagtcagaaattgtagagccttttatggcatcaccttgggaatcacacagtgtcacttccactgtactctattaatccaagcagtcaatgggataccaagagtcagtgggagggaacacaggccccagctctagggcaggagtgtgaatgagttcacatcccagtgtcaaaactgctgtatgaccagggctttgaatggcagagagggtatagtgtgtggaaaaacatgggcacaaccaagtgggattcaagcgtgattcagaagtcagagtgttactgtaaaacatttgtagaaataccttaatcaattttattttctccatttttgtatgcacaagagtggcatataattttagaaaatttctaccaagtgtatatgttctggctatgtgttcctacccaaatctcatcttgaattataattcaaattgtaacccccatgtgttggggcaaggacctcattggaggtggttgaatcatgggggtgatatgctgttctcatgatagtgagtgaattctcatgagatctgatggttttgtgaggggctttccccccttcgttctgcatttctctcattcttctccttcctgccatcatgtgaagaaggacgtgtttgcctccccttttgccatgactgtacgtttcctgaggcctccccagccatgctgaactgtgagtcaattaaatctctctttcctttataaattgcccagtcttgagcagttctttacagcggcatgagaatggactaatgcaataaattgttatcaggtagtggggtgctgctgtaaagatatcaaaaaatgtggaagtgactttggaactgggtaacaggcagaggttggaacagtttggagggctaacaagcagacaggcaggatgatgtgggaaggtttggaacttcctagagacttgttgaatggctttgaccaaaatgctgatagtgatatgtacaatgaagtccaggctgaggtggtctcagatggagataagtaacttgttgggaactaggataaaggtgcttcttgctatgttttaacaaagaggctgatggcattttgcccctgccctggaagtctgtggaactttgaacttgagagagatgatttagggtatctggtggaagaaatttctaagcaacaaagggttcaagaggaagcagagcataaaagtttagaaaatttgcagcctgaagatgtgatagaaatgcaaaacccattttctgggggaaattcaagcctgctgcagaaatttgcataaataatgaagagatgaatgttaatcatcatgacaatggggaaaatgtctccaggtcatctcagagacctacagcagctcctcccatcacaggcccagagacctaggaggtaaaaatggtttcgtgggccaggctcattggccctcatctcctctatgcagccttggaacatagtgccctgcgtctcagttgcttcagctcctgccgtggctaaaaggggccaaggtacaacttgggccattgtttcagagggttcaagccccaagccttggaagcttgcacatggtgttgggcctgtgggtgcacagaagtcaagaattgaggtttggggccaggtgtggtggctcacgccagtaatcccagcactttgggaggccaaggccagcggatctcctgaggccaggaattcaagaccagcctggccaacatggtgaaactctgtctgtactaaaaatacaaaaattagcctggcatggtggcaggtgcctgtaatcccagctacctgggaggctgaagtggagaatcacttaaacccaggaggtggaggtcacagtgagccgagatcatgccactgcactccagcctgggcaacagagtgggactccatgtcaggaaagaaaaaaaaaaaaagaattgaggttgggaaatctctgcctagatttccgaggatgtgtggaaacacctagatgaccaggcagaagttgctgcaagggcaggcccctgatggagaacctctgttagggcagtgcagaagggaaatgtggggctggagctcccacacagagtccccacttgggcactgcctagtggagctgtgagaagaggacaactgcccttcaaatccaagaatggtagatccaccgacaacttgcaccttgtgcctggaaaagccacaggcactcaaaggcagcccaagaaagcagctgggagggggtctgtaccctgtaaagtcacagggccagagctgcccaaggccgtgggagtccacatcttgcaccagcatgacctgggtgtgagacatggagtcaaaggaggtcattttggaactttaaggtttaatgactgccctattgggtttcaaacttgcatggggcctgtagtccctttgttttggtcaatttctcccatttggaatgggtgtatttacacaatgcctgtacttgcattatatctaggaaataactttcttttgattttacaggttcatgggtggaaaggacttgccttgtctcagatgagactttgaacttggacttttgggttaatgatggaattagttaagacgttggcagactgttcgaaaggcatgattgtgttttgaaatatgaggacatgagatttgagaaggaccaggggtggaataatatggcctgcctctgtttccccacccaaatctcatcttgaattatagtccttattgtaatgcccatatgtagggggagggacttactgggaggtgattgaatcatggcggtggttgccctgtgctgttctcatgatagtgagtgagttctcaggcaatctaatgggtttgtgaggggcttttacccccttcactctgcacttctctcattcttctccttccagccaccctgtgaagaaggacctgttttgcttccacttccaccatgattgtaagtttcccgaggcctctgcatccatgctgaactgtgagtcaattaaacctctttcctttataaattacccagtctcaggcaattctttatagcagtgtgagaatggattaatacagtctaaaatagatctttctttatataacttaaaaattacaagtgatgaaaagcatttgagttggttggttgtcagttttttccccctcttttggagctgtatttagtataatagaatatcttaaattagtggtcttttataataaatgaaattgggtgtacttcgccccagcatattagggttcccttgcttcatgccttccatgacagttggtattattatattttaacatttatgcctaatgattaaacatctccttgtggtcttaatttgcattttctaattactctagagacttcgtcctttcacatgattttggtcgttagtggttcctctttgaagtgcctattcatgtctgtgtccattcgttgctttgggtgttcctctctttcacactaattcattaaaagtatatatcctggatactaatcctttatcaattgctgcaagtatcttctttcagtgtgtggcttgctttttcactccgtttgttgttttttaatcaaagtataagttcttaattttaacgcactttaactgtcattttccaccatggcccgagtcgcggagtccgccttcctggcagagcgttgcgtggtcacagctgaggtctggggagcagaggcggcgggcgctcccggggggagctgggcgattccggcggggggaggtgccgatcgagcggccgccaggctgctgggggaaggagggccaggaggccgtgggggtcctcggcgcagactggagccgcaggcaccgcgcgcagccctcgcccgcatcgccgaggccccgcgggcccaggagcgagaggtcgggcgcccaggaccagagggcgtaggcgagagcaggcaccgcctccaaagaacgccctcgccctcccgcaggcgatggcgcccggccctgaccaagccagctgggggcatctccgcggagctgagccggggaagggccgggcagcccagagggtcagaagggggttttctcccggggttgtgagttctttggccagcggcaccctcccctgccggggccgcccacccgcaagccccgccccgaaggctggagcttccctgggggtgggcgacgccgagaccacgccccgaaggcgggagcggcttgggggcgggatctggccgccctcagggctccggcgccaagttcagagccacgcgcagtgctcttggccgggaggaggctgtgctgcaccagcacctcttgctccacatctccagagagcccaggtgaggcgcaccctcctgtctgcagggacagagccgcgagcgggcgcgggcggcggggtccatctcacttccacatcagcctttccccaggacagggttgttgagtcctgcctttgactgtggggtcctttccttcccaatgtcgccagcttcctctctctcccacgtcgtctccgagtcccatccccgtttctgttccctttctcttctctcactttttctcctctatctcttctttattgtcttcctgttttcattttcttctgtgtcagtctctctccctctctcttttcctctctttgtttattcttctcccctaccttctccctctcccccctgttttttcagcactcaagaattctgcctatgaatttttctcctagggtgactttcaggctgcagttgttttcctccctcccactgtctctcccggggtttatcctgtgttgctgttattctcagcccgggcttgcgctgggcagtagggtaagaaccatgcatcagccccagatcctttctccaacagattatatccaaagatctggacatgtatcctgttcactgcctttcctgggaaacaaaacaataccaaatgatcacattataatgagtttttagaatgagctaaaagaacatacctggttttagagacaaggggttgattgaatcctttccttgacattttgcctttactaatagacacagacagcacagcaggaagctaagccttgcagaagcatttagggggcgttcccacccacacctgccttctgggcaggctatgcaatgccaggtgcaggggagggaggggacaggattcagagcagggttgtaggaagacagtgggaggccagggctttgaaacatttgagggagcctggaaataagaaattaacagtaaatttctaaaatatgtagttgccaatgccactgatgtacagaaatgaaattaattactcctgagggagacattagacattttatggcagtaattatggcatttgaaagtaatgattttatgtacattagataggagggccaaggggaaaatatttcctgttagtatcaaagattgtcgtagatgcataagggacgaactctagaaaatcaagtctcattctttttgagggataaaatagaactatatcgaggcaattttttgtttcttggttacaatgtaatcttatcagagatatgtgatttagtttttaatgatattttatgacacatacatatttatatgttcaaacacacacaaatacataatatatatgcactaagttataaaagagcccttgtttgtttgtaaagatcttaattaccaataaaggttgaagctttcacttcttggaaataagttaacatgatattgtagtttattatgacctttaatgaaaattcaactaatttacttttgattgatacagaaatggaaatttggccgtagataaatcacacagaattaaacagaaattaagtatgatgaaggtgcattgcagtgtgttcagtgaaagaatttgcatatgctagatattttggacaaattcataggtatgtgcatggaactgtgatttgtgaggcttttttctggtttaaaaagttaaattgcctttatatctaatccctgatccccaacatatgcggattctggggggagggataaaagactttgcaaatgatttagaatcatcgtgtctgctttgcttggcagatttcttttcagacatccaagaggtggcaacttttgtttgaaacatataatcacaccaattatttaaaaaaaaagacaaacttaaatatttttaaacttatttttcctcattagtggtctgtgcctctataagaacatcattgtctttttatccttagatgatgctattgttggaacctgggaaggtcggaaggaatagctgaggtaaaatcatggactttttgcctgaaggctgccagtggaattgggaccactgtctcaggctccacctttattctctagttgtatcaggaaaagagctgctgttccttgtgctcttgctatctggcatgcacagagccctgttgagtcctgtccgtgagtgcctgaagtgaagatcaccattcttgttttacttatgaagagatggaggcccagagtgtttgtctgagctcaggcaggtagtggcagggttgatttggaacacaagtagtgccctggcgcctgagtgaccagggctaattcagtccctttatgtgacttccatgttgctgcagccctggcaaatataacgtctaaaatatcactccacacagcaccagccactgcctattggcattgtttggcagaacactgctccctgttctatgtcctggccatcctcagtcatattcatggcagactctcaatctgcacagcagggccccattgaagcattggatctgccctctgctttcactggccctgcttctgcacagtctcagacatctgagtggatgatgagatcacatccacccctatgagggtcgacgtggccaagttatgttgcactagggccactctccctgcttccatgggtactggctgtgttcgcagtctcctgcacttggctttcctcgaatgcagcaggcattgctgctagaggggtccaggcgtagctggccacagagcctgtaggggctgaccaggaattgctcatctccccagtgccaccagccagcctctgggaaagcctggatcaccttcagtgtttaatttcctcagtgtgccagagccaggaggattcctggaaacaggtgtattccctttcttaggaaaccccaggacctcacaatccaaatgcagaaaaggcccgtagatgattgtcctctggaatcttccaaaagggtctgggaagcttctgcagagactagggataccaaaggattagaagacaggaggtattttctgctcttgtgtgttttaactgaagagaaaagcagatgcagcaaagcactgcttggggggagcgggtgggggtacatggtgtctctgaataagatctggtgcctgacctgcagctcagaacagcttgaggctggccagttggcttgggttagggagtgacttcagacatcccaggaaaaagaggttatccagatgtttgccaagagttctttcttctgtaggtggagcaggaaggagaaaaatgcccaggctgtttggtcatttattaaacactgttatgcactggtccctgagagctcaggagtaatgggaaggctgccatggagtggactctgtccctttgcactcagtgcgataagaagtgatacccctaatgtttactgagccaggttccttagcactttctctatattaatccttctaatctttcccacaacccagtgaagaaaacaccaaggtgaccctctttatagatcagaaaacaggcctggaggggacccacgccttgcccaaggtcacaggttggatacagcagagctggcctccaaccgtggagcccgtgcacttaacatctatttggatggaaggctcgaaggttacctgagacaacctggtcaaggtgataatgtgggagaatgtggccagtggttcccagatgagtgaatgatcagtgtgcagtcaccagaggatgggtgataaaccgagaaccacaagctcttaacactgtggggtgggcgaggcttcatctcccaggatgcagcacttgctgagttgggcaacaggggaccctggttgatggcccaggttggttggaagcctttgggagatgtgctctgtgttggtggggaaggccaggcatggttagatcccctgtagacttggggagctcagtttcagaaagtttcaaagatcatcacttgatttctgtgattcacgtgatctgagggctctgaaagtggtgggtgagtcctggaattaaatctgtttttttcaagtaggaaagacatggggtggcaatgagagacatctgtgtggctcagaaagatgtcttgctgaggtcagagggacaagagccaaggagaacaagaggagcccttcccaggacactcacaatgacagagtgacgagggccagtaaagagtgtcagggggtgagagcccgggtgtgaactgaacctactgaggagagctgacgaccacaaagcatcttttcatatcatgttcggagcaaggagaacaagggcttcatagatccatcgccgtctagggcagctggtgtctgtgaaggggaggaaggcacagctccactgtgcccacagcggtctggacagaggaggatctgcaggtgcaaagggcgcaggcaggttcccggaggaaagcaggagccacgtagcgtgggctgcagtgtgtgtgctcagggctctgaccaagagaatgccctggccagggtatagcatgacctggaatgagatacccccatctgaggtgctgtctgagaggtgttggaaatgaagcccggaggtggaagagactcaaatctgatgttggccctgggaaagatcctagactaagaagaaggctgtgagtctgtgggcaaaggagagacgtgcatgaggagctggcgggggctccctggggacaagtcatgccagcctcacgtcattttccaccttgcaggtcttcggtctggcccttgttctgttggggttctggaggacgtgctgtgccctggccttactgaccttactccatgcagtgctgatgcatgcgacagcggtgaccctccagggtcccaggtgggatgaaaggtccccagctagttcctagtttcatctcctcattttctccatcctcctgctccttcttattaagatctggatgttaacattgatggagtgtgaagctgggtgggatatttaattcagcagttggcggtgtcaggatccacagtggtctctgaaagctgagatgctgccctgagtttatcgggatggcatttggcagattggagataagtgcatctgaattgagacacatagcttccctcatatggtttttatgaaaatgaaatgaacaaggtgccttatttcatttgttaatactattgtttgtcatgtagatacttacgtagccgataaatggtaacttctattctgataccctgaagcatcctgatagcaaatgttccatcctgctgtaaaggagaactggtttcttccaattagtcatacatgagtaggtctgggatggcctggagagacagcttagccagagcgcattttacagatggaaacctgaggctcagagaggttgagtgctttgctcgggaacacagagaggagtgatgtttctgcctctgcctctttgggagacactggccgacattcacctctgacgtcaggcaccccctctgaggaatccactcaaaaagggcatcaggagtggtgtggagcctgctgcaccacgtggtttgcgtcctcttcatgaagtcacacggggtggtctgcagggcaaggcggggtggcgatgttccacaggagctagtcaaaagcttgtgacaaaagggaacgtgaggttttatgttcacttttcttgctttctctctgatttatcccatgctttcactccatgagagggttgggctctctgtctcatctccttgagagctcctgcaggaagtggctggacgcaggtacatcctttcatggctgggcgggaagcagggagaggaagaagctgatttggcccaggctatatttatgcatagcaagccatggaggctctcatccactcctagattctccctgagccctgggataaatattttctaaggatgagaattctggaatgctgagtggagtctggttctgccagtacctctcaccagtggagggggcacttgaagagcttgagttctagtttccagaacttgagggtggggctggtgagagcgggtagggatgaaggcatcccagcagggctgataccacctccccatgggtgccacctttacatgtggtcagtgcatgtcttcccttccacaccgtgggcacttccagggtgaggctgaaagctggtccatccatggaggtccagtttggcacaggcaggcagttcgcgaagctctgccaggggagcagagaagcgagtggatccatgtgtggggagaaccaagagtgagcacttctggcgagtggagatgaggttacacatgctctctctaggggcagggccaggtggtggggtggcagccccttagtgtgggggtgggggccaggcacagccagacccatcctgccaagcctgcatgtgcattgctccaacttttgtccttctgtgcacctatgcctacagatcccctgtccccaggtgcctgaagtggcctggcactcctgagggtcaggagaaaaaatgagtatggcaaccagcaaggaaggaaaactgccctcaaccagggtgcaaacacagtcgaattaagtcagagctggcaggcagaagccctgtgtgctctgtgaatgtggcagctgctgctagatgctgacaggtgcaggggcagggctgagccggcgcctccgggtggcagccgtgtgtgtgtgtgtgtgtgtgtgtgtgtgtgtgtgtgtgtgtgtgtgattgttattgctggctcctctgggtggcagccatgtgtgtgtgtgtgtgtgtgtgtgtgtgtgtgtgtgtgagattgttattgccggcatctctgggtggcagctgtgtgtgtgtgtgagtgtctgtgtttgattgttattgttctgtgagagagtcctggaggtatagtgctctgagctgaggtgagttgtcacatccatagcaatcaggattctttggatgcaaaccacagcgatggactctggccaactttgtgaagaaggaattaattagaaggttatggtggcaggtagatcacagtgtcagaggaagaactggagaaataagctcaaaaaagaccgggattgagctattcagagagttccagtaccaggcacacataagcagcttctcaaactgaaactgggtttggttaggaaggatgctgagtagcataaaacagaaccaagccatctgactgctcttgtcgtagagatcgcgtattcctcctttcctgtcagctggtttaaaaacctggggcaaagggggaccctgcagtccaccccactcttcctgagatgccctgcgggggttgcagagatagatcaaacacaggctgtctctccccagggaccaacagtccagtaggtgatagcggcaacactgactatggccaggcaggctgctgaaggtggtctctgcaacccgagtcagcatggcagccctgacggtgttttggtgtgagcagctcgcagatgcagcccagttgttttgctttctgggctgcttcttgagggtcacctcaagtctgcacacaagggtagagctgcaagctctggagggaaatagcactgggttataatttccactggaggacatctataatttcatgtctctgagtgtgagtttggccacaggctcctctgtaggtgtctgcacgggaaccagtgaggaccctcaggcttgagcccccattctgctggatctggtggtctggaaggctgggcatagtgtgactgcctcagcccctccatttgtgctagggctgggggagaaggaggatggggtggggagttctctgactttgcacggtgggagtacacccttcttggaggatatgagtgcaaatggatgtcaaggagcccagagctcttcagagcaaagagctgggcaaattcctggctcccactctaactctctctccttattctcccatacctccctcggcagggttgaatttcacaattgggtctgacctggcttagtgtgaatgaaaagtggtcgtttacaggaatcctctctgtctcgctgaattcctgcccctcagtcttttcctcacgattgaaatatacccagcccttcttttccactaggactttgcctgtgccatcttaccatccctgattggtgaactcgtattcatccatcaacacccagagataatatcacctcctcaatgggacattcctcaggcaccccaggcagtccatggtccatccctgatcttgaagcatttctcccaaaccactcaagtgggcttgtctccatcccaggtcctgttacgaagaggtgtttttctctctcattgcatgtggagcaatacttccatgctattcatcctgttatcacagaataaaagaacgactgtctcccctaagagatatggtgtgggtccctgtggctagaccatgtgatcttacccataaacagtcctcacaaacactctcgatttacgtctaacccactcttgtcactgcctggcattcgcgtgtgccgttctttctgccctctcttttctttgtatctgtctgccctttggaggcctcctgcctcttccaggagggtctctctgattattctggtgcccagaattagaaagtatatggggtacatgctgtggtgtgtggtaagtgtttaacagctggttctcagcatgtagctgcaacatggattttgggtgatattttcatttacaataaagtgtaagatgaaagtggaacaatgaacatatgtcagaacttcacttgtttgtcagtgatctaaataacttctttcctaaatcacataatagtttcggaatactagaagaatagtccctcagctttttgtgagctattcacaatataacagctatcgacaagacaaaaatttcagtttaatctgcattattgacaatttttttccattactttcttaagtccagacaatgaacaaaacaagaaatcaagccttgatttatagcatttccataaataatcccattctggctgattccctgatttctggccactcacgatatccctggatgtggcatgaggaggagtggaccgtggcaagcccccgcaccggcaggtggagcagcgtccacagcgtaggcaatgggaatgtgtagtagaatgactaggaaatgatgggttctgagtatgtattgcctgtgtttttaatataacttctttgactgtaagtttgtatagtttagttttgaataatgtctgagttaaaacagctaacttgaaacattcctgatcatctcacaagccactgtgagctggctccagcacaccactggctgcataccaagaaaatcaagttgcaggcagagacgaaaaccttcagacagaattgcgtggctgtgtccactcagtttcgtcagggggtgagctttattaagtgccacagtaacagatactgtcattggttcagtcaacaactgtttctaaccccatctcacttggctttcctgcactgcagaggttgggaagctaaatccatgtttcccagactcttttgcagccagggtgcaggcctttgacacagatcctcacaagcagccagatacatcacccagccccggatgtgcagtcgagtcccatgagctgaagtctttggcatgcaggtgatatctgtcactcacggtggcagggacatctggacttgtggggtggctgtggtggactttgtaggagtttggtcccttgtgattggtgctggtaccagcagtttctactagacagtgccagggcatggttaggcttttttttctggctaccctgacccttggagagctcccaagcttggtctctggctctcacagggatttaatgagctgcatgatagcctttaataagttcctttctgtttaaactacccaggtagaggctgctgtctgcaggtgggaagccctgattgctggaacctaagggatgtgagaaatcactgtggagtgtcaaggtaaccagggatctgctcctgggacctattaatccacctcttttagaaggagtccacagtcctgtttgtatttgaatattcatgaacattagaagagcaacttagtctgggtatggctatggctgacagaagtatcatgctgtgtcacagctgattattagatctgcattttttgccctttagcttgtcaaaataatgtctaaaaaaccagattgatcacaaaagatgcatcataatgccacataaagatgtcactcggcgccttatagtatttaggaccatagaggacacctggtgcagcctcctcattttgcagctgagcaagatctttgaaggacaaggacctgcccaaggccatctagaaacactgaagttgagactcatacccgagcatcttagcttttgcccaccccacgctgtttctcagtcttaaccagcaagctttccttgttattttggtttgtcttacgtctaggtttgatttggcagcacatttcaacatctggtgaaggcatgggaataaaacagtgtaggtggatggagcacctaagagcagaatgtttggtgttctctcagggtacactgggcaaggcctgctgggccgtccttcctcgccatgctgcctgcgtttattcagttaagaaagtggcacattttgtatctttgagaatgcaactattttagttaggagagtgatgttccgtctatggaagactttgcctctctccatcttgggcttggagaaggtgtcccatgtcccagcagcatggctgtgtacagtcattgattcttttgtttacttctccatgccgtacattttgttcctgtcccttgatcacaaagaaataaatgaacgttcctgaggcactgacatgggccgggtgaggtgggagcctccttctagatattattatcctatttaaatgcattatgttcccactcatttcacgattgcccagtattcagagaagttgcattacacaactgaagctccataataaatgcgtggaggtgagattcaaacccacgtctttcccattctactttttgtgcctttctgttttaatttgcttcttggtattcctgtgtattattaatagtctgaagcttggaaatagatgcaatagtcattagagtgaagaaaatacagtgccgtgctctctgaaggataacaaggacatttttgttgtaattactattttgatttttcttttaagaatgttgccgaggaaggaaaacagagggaaaaaccagcaaagctcactgtgtctaacttttgccacatgcatggacctaatttcttacttgccaagcactagagcctttatttttgagactctgtgagggtggctgagttctgtgtgtttgctggggttggaaaaatctagtgtgatgggggtcagtggccccatgacacgccaaggcagagtaagccacagagctcagtctgccataggtgtggcttccttccttcctcacatctgtgtcaacacccggcaggaggtgcctgattccagtggggatgaagcagcctctgcccatccctccatcacccatcaagagctctggacacacatgaggttgaacccccagatggtggctgccaggggagtgtgtccacctctcacttaggccaggtgcgtggcatctcactgcggcaggcatcccatgggcgaggtcggtgctctcctgatgtctttgatatttttctttatctggcctagtctgagaccagtactttcccctgcctgtgacccctgacttcatttgcaaagttttctcatgcactttctgaaattttcatgacagagagccctggaggaatttggggcaacgatggaggtggaagaaggtttaaagctgggaatctttatgcattttctctgttttctccttctctttattttttttcttgacctatacttcacactggtctctgtcttctccatgcttagaaagcagaggaggcttgagcttccagcaaagaccttgcgacatgttactggatacaggctggtgcatagaaggggtgggtggggagggctgacaggagggtgtccctcccctgagcatcaccggctctgttcttggccagttgctctttgtccccacatttcaggttctcttcctgcattcaagcatgggcagggccagggctgctgtttcaggactgcatctagccctgaagttttctctgggcctccacaggggaccttcctactctgaactccacatgcattctccaggccacactgcacactcaccctactctccagtcatttccaactacttagaattcagtcagtgttgagagtcaccagtcttatgtagactggagcctggcacatagtaggtgctttttgcatgtttactgagtgaatgaatgaacagaaaatgaaatgcactttgcctaaaagctgatctgatctgatctgagtgcccaggcatttcacccttcttccaaagctctccttttgttcctgtggcccagggaatgctcagttccaggcttggcagaggaggggtctctctaggcagtgtgaaacagactgtgaagcccccatgagaaatagtccacccactgggaaggcccctccgctcccaggaaactccagccagagcactccagcgtgggggctaggactcctcttttccaaaggagagtagacagtgggaggaattcacctcagaatgatttcctggagcagttaggaaagtagcatctctgaagtcacagaggcttcagctccactgggccgtgagaatcccttacagaattctgaccccgaccaagcagaaaagggcactgccgcctttaaaacagttgactgcagaacaaaacaaaatgctaaaataagactagagtagtttgaaaatattggaaagttgagaaaaaactcccccaaattccatgatactagcatcatcatagtatatagcacattacatatatagtgtattatatggtatattatgtatacatactatgtatactatatgttatatggtgtatgtacatagtaaaaattatttttcacatatctattgctttggtatgttttctttcatgtttttgtttatttggtagataggcttttttcctgttttgttttacaacatgtttatatctgacactaacattgtattataagcttttttttcccatactattgcgtagtctttatagccacacttaaaaaatgaatcatttatttctaaaaacagtcaggtccattttattttggcttctggatcctgcccctccccgggcactctcccactgcagaactatgttaggctcagttccccagagagccctcaggttttccacaccacaggccccatgcaagcttcttgtgaaccctgggcagtcccttctgggtcctcagagctcagtttagatgccaccattgcctgtttgcaacactggcacatgtgcaggtccctgtgttctgtacagctgaactcaggactgcctcatcaccactgtcactaccgcgcctcgcacagggcccgcatgctgcatgctctcagtgaatgcttgcggaatgaacggaagagggaatcaatgaacaaatgacctggtggtcattttctgtgtttcctcctggggtttttcctttggtgtatgcattttgtgtgtgtgtgtgcatagaataggttacaccaaatctataatctttttgtccttttgcctcctcagcattcgttcataagcatagcgagcatcactgtccgaggctgcacagtgcttcgtcttgcgtatgcatcctgctttgttcaccatgtctctggagttacgcatttacttgcttgttgctttcaccactataaaccatgcctcatttccctctcctgttaggcagatctgacccttcagcctgcctcttccagccatggtcagactgttgttagtccagcgcctgagggagagtactttcagagttccaggcccttgtgtgacctccacccttaaggtgactcttggcacccacaggccaatcagctgtattcttagagagctctcagaatacaggctggtgggctatttccctaaggaaaagctgggtgggttctcactggggttggaaccaaggggagatgaggaaatgggaataggttggacgcccttggtggagcttcatagtttgattttacatcagagttggaaagcaaagcatacccttctgctacagctagtggtttccccacctgcgcctgagctatggactgggcaggggccaagtgcccagcaaggagcacagggaaggagcaggaggtggagaagctcagaggcaggctgcagtaggctcctcgcccttctcaccatgcggatgtctcctcccttggccctatgggaatatggagggctcacattctcctctctgtgcaggagcaggtctccacactctttgggaggaggaagttgacttctttctaacagttgctgtcctgtcattcattcattcattcattcattcagcaaaggcttcctgagctcctgtcctgttgcaggcttgattaagtactacagatgtgaaggtgaattgacatatttgggttcttagagtttgccttctagcagaccacaaacaagtaaatataatgttgcacgtggtgcatgcaggcctttggtgcccaggacagtgagggcatggaggagggagtgttgtctgtgtctgagagcactgggcaagcctcaaggggagactgtgcctgaggtgcattttggaatgagttcacaggtacgatgggaatgaagctgcccacatgtacttgggagttgggggaagagtggggacacttgactctcacaagaagcatggctctgagaaaatcagagaccgcgcagaagctgacagggcatgtgatgtggacaaaggggccaccaggctgggaggcaggtctggtagaccgaggagcaatgggttgaaattagggtcgggacagagagggctgcatgaggagcaaagaccatgaagtccatggtcctccaacactgcgaccctcatgctgcggcctccctgtgccctcagcactcagccagggccagaggtagctcgagcatggagcaggggctgagggtgcatggcttcctcatgatggagtctacttgttgacagatgacccagaaacttctgaagggcccccaaggccctaatgcagcccccagagcaggctctttcccttcccctgcagactctccatttcatgcctggttaatccccaggaaccacttttgacaggggaatcctacgtttctctctactgagctgtagaggctgctgcccatgggcattttcagcagagacctcagtccctactctgcctcagggaggtgggccctggaggatggtgccatccatgctccttgtctcctgagaggtggtgcagtcagcacacccatcccacagacagcggaggaggcctgagcatcagggtcctgtctgatgccagctcatgatgcactgtgcctgagtgatgaatgcccatctcactgcctgtcgcttcctctctctgcagggccctgtggccgagtgtgtccagcccagtgtcatggggagcttccatatctcatggctccttgctgggccaagccctccagaaccccaaacccccaaagactgatgaatgccagagtggccaccttgcttatctgtggccccggccctggtgatcaccatggcagctgggaagggagccccgttgagcccatcggctgaaaacagatggcgacttagcgaacctgagctgggccggggctgcaagccagtgctgctcgagaagacgaaccgcctgggccctgaggctgctgtgggcagggcgggccgggatgtgggcagtgcggagctggcactgttggtagccccaggcaagccccgacctggcaagccgctgcccccgaagacacgtggagagcagaggcagagcgccttcacggagctgccgaggatgaaggaccggcaggtggatgctcaggcccaggagagggagcacgatgaccccacaggccaacctggtgccccacagctgacccagaacatccccagaggcccagctggcagcaaagtcttctctgtgtggcccagcggagcacgaagtgagcaaagaagcgcctttagcaaaccaaccaagcgaccagcagagaggcctgagctaacctcagtcttccctgcaggggaatctgcagatgccctgggggagctgtctggactcctcaacactacagacctcgcttgttggggtcgactttcaactcccaagcttttggttggtgatttgtggaacttgcaagcattgccacagaatgctccactctgtagcacttttctgggtgcccctacactgtggctggagcatacccaggcccaggtgcccccaccctcatcatcctccaccacttcgtgggccctcctgccacccaccctcacctccctgggcttgtccacccagaactggtgtgcaaagtgcaacctgtcctttcgcctaacgtccgacctggtctttcacatgcgatcccaccacaaaaaggagcatgcggggcctgacccacattctcagaagcggagagaagaggcccttgcctgccctgtgtgccaggagcacttccgggagcgccaccacctctcccggcacatgacttctcacagctagcaggtgaccgcagaatgacctgctgggtgcagcagccagcctttggcagaggggggctccctgggcctgcgttgagggggctgtcatggtcctttgcagagctgctgcttttggcattcatagataaacagctcaggcataatttgaaaaagccacacctgcatgatgtgttttgaaggaaatgaagtcctgaaataaagtgatgggctttgcaaatccagggtagaggccctaacaggcacagagagcaggggcaactcctggcacacatcatgggctttggaggcacacaagcctggattcgaatctgggctctttcacatactagctgtgaccctggacaaagagctttaacctgctgagtccccattttctcatctgtgaaatggagatgataacactgtgtcttaggttggcattcaggtcacatgaaaggtgtgtggaaagtggccagcattctgcctgcagaccctgagcactgagtcaacaaggtttgtgatgatgtctgtactagttagctattgttattaacaagatctccatggcagacaagctaaagcatctgcctaagtcgtgagtctgtgggttggctcaggttaagctgagcttggctgggcttggcagcaagtctcagatttgatcaagtcatattcgttttcttcttcggctggtgggctacccagagcgagcacgcttctctcgtggtcatgccaagaacacaggagggtgagtctaacaagcacacctcaagcctctgcttgggtcacattgccaatgtcctctcagcccatacaagtggcaggaccaggcccaatattaaggagtggaaaagtgtaggctgcccttggtgaagctgtgacaagggagtgaccatccatcccctccacaggagggtgaggaattgggacaggtaattccagccaatacctggtccatagttcttcacattgtgagtatatgaatacggggaaatagaaccccctccccaccacctacacacatgctgttttaccttccaagaataggacatgtgcaaaaactaggcttccagatcgtgaggctggggagcattctaggtaccatttattatctactgcgtttcggtcagtagctgttgtaggtacccgcatcagcccttgttcctaaggatgtgtggagcccaggctgtactctttgacattccacaggtcagtctgcgtgaaagccctttgtggggagtttccaagccagtgtcgtttttgcactggtttccacctcactgtcagatattgttcttttgatatgcagtttccagccctccaatgagtccccagcacagatctcaggcttgtggctgggaataagcccagctgagcaggtggggatctcagccagcctcccagactgcacctcttctattgctctcctctgtccaccgttccaggcagcagcactcccacctggctgctctgatgtcctcgctccctccattcctgcctctcaccatgcacgcatccattgtccacacacacacaaccagataatcttctgaaagtgtaactcagatgatgcctccaaccctgtggctgcccttcacacttacaggcctaaccccagcaggacctgccagctgcttcatgaacaagtccctgcctcatgttaattgcaagcactcatttcactctccctgtgtgccaggcaatagcataagcactggaagaatacagatgttatagtgagtcctacaatagccctggaaggcaagagctgtttcctttccatttctacaatgagtcaattgcagatgatgctataacacttccagtgtttctgacacttccctgaagctatacctgctaccttcatgggccgagcttgcccttatgaggcccacaggtggcagtgggcagaggggaccccgctataccacctcgctgctgttccactgtctgctcccgtgttctgaccacagctctggtgccgtttctcaagcctgggcttcattcaacattttctatctagctcttcatggtgctgctcctgctatggttccacagggcttcttctcgcaggtcagctccttagagaggtctcccagattccccgtaaagcagccctgcagcctctgcctctctcagccgcatcaccctgttgcttccttcacagcatgtctcaccatctgcaaccatctttctgtttgtcgtcttgttgatttgctgcctccacactgtcagctccttgggaacagagattggtttgtttactgtgcatccctggtgcccagaacagggcatggcatattgttggtgcataataaatattgtggaaataatttctgtgtgagaagctgggtctgaatatgtgtgcaatcttcctttggctgtggagggttgcaggaggctgccatgcagctggaaggctccatgtgtactgagcttccttcacctacgctgtctccctggccaggcaagggattgagtgagtgggtccatttccattcatttattcagcatccctgggcactttgagctgagcctcaaaggcaagtatgtgccggtgatttggtgatgcaggcaggggagcagtggctgaggagaaagatcagtccagagtctgcaattgtgtcagggtgtgaggaggagatggaggggcaggggtaggagggcctcacgggagagcggtttggaccgaggggactgagggcttggctcggagaggcactttgggggtactctccagctgcagtggggagcgtggcctggaggagggggcctggaccccctgagctcattgtcttccacatctagaagagggaagggtgctccctgcaggtgccaataaagcatcatcattcccaaagggacactgggaggtcccttgctcactaagacaagacaaggaaagctcagccttgctggcccctttaggtgctgtgtgggggtgtcatttacacatggagaggctgagcacagaaggcagctgaagctatgggagcctccccgtgtgctgtctcaggtgaggcaggaaagggcaactcaaggtctcggcatgaggccccacactatgcacttgacacgcagcagccaggaggcagattgttattaataattcccactctgctgcagatgacattaaactccaagaggtcaagaactttcctaagaccatgggctcaggagcatcagtgcaagaataagactccaggaccccagattgagctcatgtcctttttagcctgccacttgtctgcccagcccagtgtggttggatgattcaggaactgggacagcagcaggtgtaggctccctgtctcaaatttcaattcacacctgctactcgtaaacacacacactttcctatcgtccttctccagcactttcactatcttgcatactaagtctttgactgatttgtcttgcttaccgtgtctcctatcactagaatgtaagctctgtgagggatttttggtgggttttttttacctgcagcattgctggcatctagagaaatgtagccacatagtaggtgttcaacagacatttgtcgaatgaatgaatgagtgagatgcctggttctggcctggcaattgccacaactcaaatcagcttctcgggagggttttaggatctatcaaatgctgtgcacaattgtccttctctggcttaattgattggtttgtaatttctgtgaaatctctttgaaaggcagaaatgtgccaagacatgatagacacttagaactgaagggactttagatttctagaccacaccctccctgtacaacattggactttgaggtccacagacatgagctgatgtgctcagcgttgcagggcaagtggtggtgaggtcaagtttagaaccactgagaggtctggaccttgccccatccacaatccatgaggaacctcagctaggccaaacgacagtttacactgcatgtgattagaacggcctcacatgtaattattagtaaccttgaccagttacaccattcccaagcaggataggcatttaggaaaatttgaagttatgaaaaacaacacactatcttcccccaactctgatttttaagttggagttaattttggtaaaaatggatgtagatccaaattgctcacagcctgccatttaaatggacaaactcaaaagtgattcgtggaagtgatgggtttacagcttgttaatattgcagtcccaattatcaccaggctgggttcccagagtctctttgggagtcaaatcctctcttagcccttctccatttctgccctcctgtatctcctggagagtagacatgttaaatcatggttttgctcaagctctctctaccacttctatggtctgaatgtttgtgtctcccaaaacttatgtaaaatcctaacccctgaggtaatggtattaggaggtggggcttttgggaggttggaattcgtgcccttacaaaagaggctgggtgcagcggctcatgcctgtaatcccagcactttgggaggccgaggcgggcagattatgaggtcaggagtttgagaccaggctggccaatatggtgaaaccccatctttagtaaaaatacacacacacacaaaattagctgggtgtggtggtgggcacctgtaatcctagctacttgggaggctgaggcaggagaattgcttgaacccaggaagcggagtttacagtgagccaagattgcaccactgcactccagcctgggtgacagaggaagactccgtctcgggaaaaaaaaaaaagaaagaaaccccagtggctggctgcagtggctcatgcctgtaatcccagcactttgcggggctgaggtgggaagattgctcaaggacaggcatttgagaccagcctgggcaacatagtgagacaccccctctacaaaaaatacaagaattagctgtatatggtggtgtgtgtgcctatagtcccagctactcaggaggctgagatgggtggggtgggtgggggagttacttcaactcaggagtttaaggctgcagtgagctatgattgtgctactgcattccagcctgggcaacacagtgagacccagtttctaaaaaattaaaataaaccgcagagacctagttccctgcttccaccatgtgagaatgcagctgaaagttgccatctcccaactaggaagatggcaccaaacaccaaagctgctggcaccttgatctggaacttccgagcctctagaactgtcagcgataaatttctgttgttaataagtcatccggtttatggtattttgttatagcagcccagatggactaggcagtcaccttctatatgccagttaagagttggcatgagatgttgccacaatgtatcacatcagcaggtattaattttacaatcctgggcaagaattaccacattccttaaattctctatgtctaattgaatcgctcagcaccccatcctgtgggcctggtaagatactcaccctgtcactattgaattcctaacctgtctctcaagctcacaaaagctcctcaatgccccacctcaagattgtaccctgtcgcttagtgccccagggtgtccccttgctgttctggccagctttgcttctgttctccactctcctaggatctagggccttggtggctttctggcaaagctgttggtaggcatgtgacacgaagacactgagtcgatgagcagaaagtcttggctgaccttatggaacagaggaggaaaaatatccacagtagctggaaacatggcaaattctatcttaataaattatctcccagcggcagccattcaattcagatttataaaagtcctcaaaatatgctaatgaggctaaactaagacattctgaattcagattcattttggttctcgattttaacaaatgtcaagttttctttctgtttttacctgggaaaggagtaaaaccactacaatggtgggctcctagaattcaacttcttgccaattcctgcatctctaggccagggatcctaagctcaaatgtctattgaagtaggctaatgagtggatggagctgcctgtaagtggcaatggtggggagctcaatgcctgggtgaagactgcacagccaggctggatgcaggcctcgagaaaggccagagttcaggtctttatatgaaatttgttgtcaactgacacaatagttttgcaaacactgatggccaaagtgacatagattcatggaagcatgtcagtggtggtgatggtgcagggtcgccaccagccggtgaccccttactctgttatgctcccagctttggaacaggccggtgctgggcctggcgcttctaacctcagccgtaccaccctgttcctgtgagcacggagagagagcccttatcaggggtgaaagtcggccagagtagcccccaggccgggcttgcactcctcattcccttgggaagtgatggcgccatctggaggcagcaggccttcctgcaggccacttcccttcagagagggaatcacacacccttgtcatttgcctaattttgttgtgtttttagaagtcatgtggtaggtctacagatggcatagcaagatcagaacctcataggataaaccttttatttgaaagataagccattctccaacatgggttgggttgtgacacttcctaggagagaagaagtttcagaaaccgttttgtttgtttgttttgttctggttttggagatggagtcttgctctgttgcccaagcctgagtgctcgatctcagctcactgcaacctcagcctcccaggttcaagtgattctctcgcctcagccttccgagtagctggaattacaggcacccgccattatgcccagttcatttttgtatttttgtagagatgggatttcaccatgttggccaggctggtcttgaactcctgacctcaggtgatctgctcgcctcagcctaccaaagtactgggattacaggcctgagccactgcgcccggcccagaaaccggttttgaaagggggttggggaggcagtgcctgcagggagaatgggaggggttctctaacgctttctttccattcatcttgccatctcgtgttttcctggggcaagacggaggaagccactatcgtctgatcccattgctattctaagctgcttggattaggaggctatttttagtgctggcagccctggtcagcaaagcagagagggtacctaggccaggtggcagctaaatcccataggaaccaggagatgggaggtgggtgcccccaggcagggaccttggaggtgggtttcctggcctggagtgtgaaccggttgcattgcttttctttctgagtcacatcgtttcaccgcatcacagctgtgtgggtaaccagggccctctggtgcacagtcagggccctctcctgtgtaggcctgtgcggggcagacacagggacacaggaagaggaagctccttcctcattgcttcagcccagcctgaaagcaggaggcccgcgagggtccccatgtggtccttttgcattccctatgtatgaagcatatcactgcaatagtccctggcccctccttccctggatgggggtcaccacgtctccagcaagaacttggaggtgaagatcaccttttccttcctctccttacagagcctggcagaggcatggcttgttgctgactgagagcatctggaaatgagcccccagcactcagagtcaccaccctcaccatgccccccagctctgtgctgtcagttcctggtcagactgcaaagatgcccatgagtggactgtgcccatgccctgcccctgctgctaacacccagtcccccaagtcttctctggcgccagggaccaggtctgagacagctctgtttccaccacttgccctgtggctggcctggcatcctcaggatctgccctggaggggaaagaaaggcagggagagatgggcccagtataccctgagttcttttctctacccaatgactctggcttggctgcccagagtgtggcctgggctttgatagtgaacaatagggaagcttctaggcctgtcttgccccagagagccagctttgagtccctgccagggcctttataatccatttattatacatgctgtcacaacagggctgagctgactcctgggggcactccagcacccctggatgccagtcaaatgaacccctgcttggtactgggtgacttacctcttcaccacatctgcaagagggacagataaatatgaccttccagaagtgtctgcatcacctaacaatgcccttccagtgaagatgaacccctagctgcaggtcaggccacagagatggggcaggaagctgtgtcagggatttaagcacaaagctgggaccccaagacaaggaagggaaagacgatggcaggctgggtgcagagcagagtgacattaactcaggtattaacttatcttgggtcctgatcattggtggacactgggtgagcagtggggggacagagttgagggagtctgagtgtctggaaggaggtgtggctgtgtgcaagatgtgagttggaggtaagtagggttgggcagggtgcaggccatgagctcagaccagggcatagagagttgaaggggcccagggctcatctgaacttctaggcagctatcggccatctggctgtcccaccagaaaagagacctgatgggattttgttttccttttcctttttctccagtcttgtgcctgcaagcaggtaacaatgcaagaaagcttgcatttaggaaggctgagcctgttctttgctacgcagaggactctcgctcctctctatctcaaaccccctttccagatcaggcccagggtgtcttcatgatgtggtggaaacagaaggatctttggaactgtacagctatgggttcagatctcacctaccctttaaccagctgcaccagactgtgctgttcattacagaaaaatgaagtctttggtggatggaagcagacagggatttcaggagggagcccggatggtgcccagtcctagatgggcaggctgggggacctggctgagcagtgggttgggacaatgggtcactccactaggaccacagccaaagtcacaccaggaagtcgaggaagcacctgttgagggtgctgctgctgtccctgctaagcacagggcatggctgtgctgtccctgtacactaggcttctggcagatggccgctgcccaggctccctggccacttgctccagattaaacatcttgcacaggagcttctggttgaccaaggcaggatcacatgcccatgccctactgccagaagggctggaaaagtggggcttccagagtgttcagctttgtggtggagaaattatgacagctaacattggctggacactagattaactcacttcattctcacaactccaagtgtagtattatttctcccattgaacaggtgaacaaactgaggcccaaagaagtgaaacaaattgcccagaaccactcagctggggaagtggctgggctggtttcccacccaggcaaggctgacatcactgtttcctactgattcctatgggcagtgattctctgatcatccaaaggtgctgcaaatgctgggtggcccaaaggaggacacaggtccaccatgctggatgtgtgaccttgggtgagctgcggagtttgtctgtgtctcagctggctcctgggtagaagatgagagtggccagctatgcagccggcatgaggctcagaagagacacagccagtgtatgtacatcaccagcagaagggccgcaccagccctttccctatttaagatccacaagatctttgccacctgctgaccccacagcatcttgcaccacatcttaaataaaatcagctgtccatagaggtcagcagggcagatccagaagatctaaataatgtgaatggagaactcatgaaaagaagagatttaacaaccactagtgatcactaaattgtggttaatggctcgggtatataatttattttatcttctttattttgtattttggaataatgatagctgcatctgaaaataatgatatatgcacattaatgagtatttaagaaaaagagcaaagtatgaagaaggaaggtaaaaataccaccccaagttctaccacttagaaggaacctttgttaaaatttaggtggttattggaaagccatatatatatacatatatatacatacacatatatatgtgtatatacatgtgtgtgtgtgtatatatacacacctccagctgtaacctaaccagagctcagcaggcccctttgctgctcctgggaacctcaggccgggccacctgcaggagtgcccttggtgtgtgtcccagaggttctgtctgccctggggctctgcctatggggcccttccctacaggtggtcctgcaggcctgggctccgcttcaccctcagctggttgtgctggagcatctccttggccctggcgagagcctcttctgcagggacaaccacatggggtgtcacccccaccccttcccaggagctgccatccgaggcccccacagaacgggccgtggggatagtgaggtagaggttggtgtcatccacgtggtaggtctgtggtggctggcagcccccactggtcacctccccaatgaccagggcccggcccagcctcttcatgatataggtgaactcctccgcggtgccggccgtcacactgctggtcagaatgaccatgctcttcttggagccatagcgttcacctggaagacataaggcccttcaggatgggggtcatgtcaggaccctggagcacctgtcttctctatcctgcctgggcctgcagtgatggaggaggcccgggggtttaggtctgtgtccttgtgtccacttgtgagccacttgacttctctgagccttgatttctgcatccgtaaaatggggacaagaatgcatgcccaatcacgaggatttcagtgcttgacaactcccaacgaggcctttttatgccaagtgataggaaaggcttgactctcctgagaaaggagcatcctctctcttcatgaataatgagaacacctaaaccgacctgacttccttttcactttggactcagaaaagcccaatttgtgatgtataagaacaactctccaggacagcactgtccaacaggaatgcaacgtgagccagaatgctggccatagatgtcattttaggttccctagtagccatgttaagcaagcaaaaagaaacccatggtgttaattttaatcatgttttgtttaagccaatgtatccaaaatacattcttttcaaaatgtaatcaaataaaattattaatgaggttttcttttcataatgtcttcaaaatctggtatgcacattacacttccagcacatcacacttccagcacatctcaacttgggagagccacatttcaaatgcttggtggccgcaggtggcttgtggctcccatattggaccttgcggttttggggcctcattatctgcagaattgagtctatctttaacttccagtcttgaacatctatttgaatttagaattcacctggttctgatttgcatttacacttgtaatattattgaacgtatgtcctaggagctacagcaaaatgcctgtgtattacagaagcatggacatgaaaatggtggggtgtttctctggtcacaggcacacccccatcggtctctccagtcctttcttgttgggtaggagcacaagttccttggtcttacacactgggcagggaagatagatggaggccatccaccctggaatggggctttgagagttatggttctgtaaagctcagggcctgcctttgctcctatagccactgctctgggcccagggcggggaacagaagcccgatcagcatcatgacctttccaggcaagtttgtggcactgtggcttgagagctcaagtactgtgagcactggcaatgcccactggggttggtgaggggcggggagaatccttcaaattctgcatttgtcctgcaggctggtgattatggtgctaagcctgggggaaattttggtattagacaaactaatattcacattttgggtttcacttattagctgcatgaccctagaaaagatatttgacctagtcaacacccccttttttttcctctagaaaacgggcatagtgatacatgcttttcagggattcgagatcatgcacatctagtgcctggactaggacagggccttacattctggttactatgacttttacctacacccaagctgtctttccctggtttcccagaagcttctagaatgacagcagaaaggagaaagcttctccacgtacctacaacctgggcgtgtgtccagagttcactgacagagtcatcaggccggctgtagatcttgtccagcagaactggagggccttcatcaaagaagtaggagcacaagatgggaatggaggatgtggggccaccgatgttgaacctgaaggatgggaagcagagcctgttcaggggctgagctcacagtgaggccctgtgtgcccctcggggaggccaggatctttgtcccatggagggttctaattcttggcagcctcagtctagtgcctcttcctcctttagaattccatgggttggcattttccagagtatttccaagagtactagtctctttagaacaagaaacttagtgatcaaatatgttatcctttccttctgctatgtaattaatacatgttaatatattaaaggccctgacaagtcctgcagtcagaaacttgttgataaatttcccccatttattgaccatggactgctcccctgcacccatatcttcctatgagtggaacacattttgggaaacattgtttttcccgttgcattctgtgacaatcttatgacacctaccagctgtcttagttcaggtgtcttaacagggcacttagtgtattgaaatattcaggcttgtggagctgcattgggagcaggggagcctgtatttctcccaggccatttagatttgtcccactgtgtgacctcgttgggcccctgtctccccactggggctagtgatgtgttaaggagcctcgtccaactgatggcctgggatggcctggctgggttcggggcctgtgatgtcagtgtctgaacctccaaacaaacctcaggggtgggagggtctttaagcaaagtgcacttgcaggctggggccatctcctctttaaaaagtgtaaatggcatattcagaagaaagagacttagcatgagtgtcatttgggtgctcaacagaacttctaaagaataaaatgatcagagagaccccaggagcctcaagctcaggctgtgaacacacacagaactggagccagggctaatgttttatctcccagggaggagaagcagtgggtgcaggaccgagagccacctagtgaccactaagaaccatgtgagtgagcgctgagggctagagaactggagctgggtgaatgcttctggtctgccaccccctgccacttctttcagacaacacgggagcatggaagggtcccgtctgaggaaggcaacctgcccagggagggtgctggggcatgtccaccaatggaccccagagtcatgggatgccaggtctggccactgcctgagggtactcatccacctcctacccctggtccatgaggtaaactcatgacatatgaggcacatttttacagaaacagaggggaggtggctagctgaagacatccttctgacaatcatttggtgatgcaaagaattcttttgttaacaatagtgattaacttctaaattttccctgtgtgatttccaaattctgcctgtacgattcatatgaccagggttgtcatgtgttgattttgtatgatgtgaggcacactcccaggtggggggcctggctgtctcacacaccactgaccatcagaatcacctgggatgcctgtcaaatagagattatcgggcctgtcccctggagcttctgagtcagtaagaggggagtggggcccaggaatcagtgtttttaacatctccttcctctcctccccactgaatcctatgaccaggcaaatctggggtaattctcaatctggaatgcacattggaatcactggagaagcttgcaaaaactaccagtgctgggccccacctgcaatgacagcagatctgctgggctagctggccgaagccctgataggcaggaggcctggcccccctcaggtcctctgctgtgtcacagggttccttttcttccctgctgtggcccatagctttgactgtcccctggcagccctgcgtcctggctaggaagcactgacccctggccactgacctcatgtcgatgatcatggcatccgtgtgcatgatcttcttccagatgtgctccaccagcagcctggagacctgggtgagcagctcaccgtccccaaacatgtcaaacctcaagtagccaatgttgtcctcaagcacgttagtgtggaaggaaaacttgatcagctcttcaaatacttcaggggaagggatctgtaagagttggaggtcctactcagtgtcaggaggagcagccagttttagagcccaggaaagcaggcgccatgggaaatattaagggcatgggacaggaactaacatttctgaaggaattagtagacaccagggactttcccagtggcatgtctggatgtgacatgccactgggacatgtgtgatctatgggcagcctccttgcagaggatgctcctgtctgccacccacatgccctggtgtcctgagctagaaggcccaggaatggactcccctctgacctctccaaccttaccagatacttcctatgtctctaagctgctccactggggcaggattggaagatgttagttacctttaccaggcacctggcccggtactaagcactttgtagagcttatcatcatcctcacagccacctgtacaggagataacacgatccccatcttttccatggaaaaactgaagcacagagagattaagtaactagtctcaggtcacacagtcagtaagtggtggagccagaatctgaatccacatctgactccaaatcgtgaaccttggctatactggaaaggaaggagatgttgatttggaaactggggattctgcaagcctagcacaggctactcgcacgtggatgcacctcctcctccctctctaaggctgctggagggaggcaggtcttggtgagattgacaggcaaggagacttcattgacagagacactgccctccaggccctgccctgccctcagtcacagctctctggcctcaggccactcccctctgctcctctccgggcctcagttgcggaaaatggggataacaattctgtagtagatgcttttggcactctcagccccctctgctttcagctgcacccgaccccactgacaggctctcctatagcacagccctgcctttccacccgtagctcaggccttctccaagaagagggagcctgccccaccctgaggcatgtctcagggcaactcttggccaatgcgggacaggaaccactgggccctgcctgcagagggctatgcctgggagcatccctgcactcgtcagggtcctggcttcagcagaacagctttgaggcacctgcctgtcagcttcccaacccactctccctgctccctccttcatgcctgcttcagtaaccgcctcccagacaaagcgcctgcacccaagccctggtctcagaccctccttgcaagggatcccatggcaaatgctgccctgcccaattgtgacgatgcagcagaccacaggtagaacagtgtggaggtgtgagtgctgcctaggtggagctctcggccagcgtggggcacttggtgaagtccattggccacctctgacaggtgttggcctcttccctagcactgacaatgagaagccctgccaacactcaccttccacccagccaaggctgaaatgccttctatcccaggagcttccgaactggcttcctgtgagtattggttggctttcaaactggcttcctgtgaggtgggtgcaaaagtaattgcgggttttgccattgaaagtacttttgcaccaacctaatatgaatgttctacagaggtgttcagcaaccccagggtcacagagagtggatggaacaggttgagaaagaggaaaggacttgaccggtcaaaacttaaacgtgagaacaaatctaaaagccattgtcacgcactgtgcacagagccctgcatgtgcggacaatgggtcaactcactcccgggactgggttcagccaggtctctcttgggtctcacctgcatgggcacaattccaggaatgcggtccttggcattctcagggatatgggctgccttcaggtgtgggtctccggagagcatctgcaggtcagcccccaggatctcggctagggccacttctgaggtcaccctggagtagcggctctgcagaccgctcagtttggtggccatcttggcccccagctcggcagaggcatagttatcagccaccagcttcccggccgtctgcagcaccgtgggcaccttggcacgcagagccactatgtcctgggctatggaaagggcttcgctcatgggcacagtgatgtcgggctccacaccagccaggtcccaggccttgcctgtggtggcactcatggccatctgggtgggcatggatgcatataaggggctgctgcccacctggtagatgcccacagagagtgcgcctccggccgtgggctccccaatgaccgtggcccgctgcaggtcctgcatggtgtgtgcaaaggcctcggccgcagagccactggtgtggctcatcaggatgtagaggtccttgtgtgagccgtagcgctggccggcgacctggggcaaggtccacacctccgtgacttttgaggtggccctgtcaaagacagaatacaggtgctggcggggctctgcctcaaagaagtaggagcagagcagcgggatggccgtggagtagctgccagggttgtagcgcaggtcgatcaccagcgcagccgtgtccaccagctgttgccataccagccgcaccagctgtggccccacggccttcactgtctccagttcagccatggcgtcaaaacgcaggtagcccagctggccgggcagcacctctgtcttgaacagggcctcaataaggtaggtgagctcctctggagaggggacagcagggggtggtgggggtgcttcctctaccaccagctcgccagggctgtggaacactagcaagcggtggtccccagacacctcctggaggtctgctgtgagctgagaggccagagactccaagtccacagctgtgcggtaggcgccctgggccagcttggcccgcaggagggcactggtctgccccacgacctctggccgagcatagtgggcctccagcaggtgccctgtgccctccaccaaggcccccaggctttggtggaactccagcacttcctgggctttgtccagggcctcctcggccagcacgatggcatcgggcaccactccaccacccagccaggcctcgccgtgattgtcgatgaaggtgaggaccggcacggtgagcgcgaggctgccttcgggtgtgtccagcagcggcaccgtgcgggtgtgcagcaggttgcccgcggtgatctcacctaccagtgtggcccagcccagcgactgcataaggaaggcgaactcctccgcggccgtggcggtgcggtggctggtgagcagatacaccccacgttgggtgctgtagcgtgggcccgggagctccatgtggctgaagtgctcctgcgtgatgttggtgcggcgatcataggtggtgaagaggtgcacggggccggcctcagggccctggaagtaggacaggagcaggggcacagcagaggatggccctccagggttgtggcgcaggtccatgatgaggtgctccgtgtcctgtagcggctcccacacctggcgcaggacatatggggccaacacacccaggacggaggcgtcagcaaaactatcgaagcgcaggtagcccacattgcctggcagcaccgacacctggaacacagagtccaccagtgcttgccggatagcctcgtcctcaggcaactctggggccacccctggtgagtcttcggctgcagcgtcgggcgcgggccaagaaggagtttctgtgggcccgatggctcgcaccaggagcctgggatcctcagacgcagcctgcaggccggcattgagcttggtgaccagatcttcctcggagaccaccgtggagaagtccatgctggccaagtgctgcagcagggtgggcacacggtccaccagcgtgtagtagtccttcaggacctcctggaggcagtggactacccctggaagggcgctgcgcagagtgaggatggccagggctttctccagggcctgctcggccggagtccccacacagggcagcaccccgctgccctcccacgtctggctgcctccaccaaggggccccagggacctggacacgggcaccgtgaagaagaagtcagactcgcctatcctcagcttccggaggtccagggcccctcccccagtccgctcgcccaccacgatggccctgcgcatctgcttaaggatgtgcgcgatgtcctcggccacgcccctggtctggctgctggtgaggaccaccacatccttgtcggcaccgtacctttctcccaggacctggggcaaggtccagatctccgtggtggtgttggaggggcggttgtagatagtgtccacgtgcaggatggtgttccctgggtgcaggtaggagatgatgtagggaatgccagagacctggcctcctgtgcagtgccggagatccagcactaaggcggaggtgcccatgagattcccccacacgtgggccaccaggaactcccccatcatgctcagcacctcctggcccgggacgctgtccacccgcaggtagcccacattaccctccagaacctcatggcggaggcccctttgcagccaggcaagcagttcctcttctgagaggctggtgagtgctgggacttgtgggggaggctcgggggtgctgggctcataggagatgaccaggcgaggatcgttcagggagctctgcaccccggctgtcagcacactggccagcgtctgcgggtctgagatgctcagaatctcatggctcttgatggcctgctggatggcttcctgcatgcccagcaggttctccgggaagcagtagttatccaagaggaccttggccatgtccagcaccaggcttggctggaacaggtgtgtggggccagccaggccacagagcagcacggacatgagcagaacccattctctcatcatggggacccagggggaggcctggctcctgcacaaaagctccctggactgtgtgcaaggccgtggccctgctctgtgcagctgccttccgcccttgtccttctcagctggtggacagaaggtctggggctaaactcctgagttggggcaaggcttccagctccagtaagcctttaatcctgtctaattcaagcacatcaaccctgggtatcggggaggagtggccagggtggtttgacccagaaggtacattgcatcttatcttgctgtgttgtgtctgcatatcataacattaatcactgccattattttagttcctgctacatgccagacactgtgctccatcctttacaagctgacagtttccaccagagccttgcaaagtccagttattaacttgcaagtcctccttggagaactgttctgccactgtctctcccgtggcctcagggaaatgtcttaattacttattgtgtagattaaatgagaaaatatgtgtaaagcacttcttcccagtacccagtaagtaggaagcactcattactggtaagttatctgtattagatattacctctgtttcatagctaaaaaacaaaaaaacaaaaaaacaaaacaaaacaaagcaaagcaaaacaaaacaggccagagagttctgtaactaatagaagcccatcgttttaggtgtggacagatagggggtgcagcaagaagaagtccttggggctacaattggcccatacagtgcagaggctgagtctgaggctggcatcagcctcagagcttgagatttatttctatgtccctttaatgcctccagggaacagaacgggtccccctacagctttctaatgctgggaatgatgtgtctggaccaccatgtagggtgtggagtgtagaggcgcccaccttccagacatcacaggactagtgttcccattcaaatgaggttagctctgagagttaatggctagaggggactcctgcttcttgaaggctcagcccacagcctgcagttcgcagggagaatcaagcaggaagtcttgggtctccgtggtcccaggcttcacatggaatccagatcattcctcctgactgcataaagcacaagaaacagggaaaggtagactgctgaactcttcagatcccagctcctgccacttcttatagaaataatgtgggtgctgcttgcaactgactggctgtagaaatccaagaagtcctgctatggggtcggaacctggaagccctgctttgccgctgaatgcctctggagatgggcactttcctcacttaacagacagacaactacggcccagagagtggtcgcaaggccagggcagagcgttgggagagctgtcccaagctggctccagcaacaccgccttggctgagcgggcagcaggcaggcgcccctgtgtgcctcagtaggcagctggagaaggtggtctcagggacgtgggctttctctacacagctgagacccacaatctgctctttggaaatcattatctgaggatgtttaccaactgctttatgaaggccaaagaggtcaattagctaaaacaaacatatttttagctcattaggatttgtgtaatgctcaagtgacatatggtcacatcactccaccgtatgcagccaatggaagtgagcctgatttacgatgagaatggggtggggctgggatgctgccaacacctccggatgaatgcactccttgcatatccttagccctgctgggaagcctgggccttctcctctgcctccacttggagaatcacagttctgagcatgcacttccgtgtcctcagagggcacttgtctgccattgcttgagtccaggcaaagcttctggcccagaaagggcttgggggagaacaggagtaagactgtctttggggaaaggattccctggagtcttactaagatgtagtttcaggataggattgtctggacctatcactgggatttgatttgtgtggctagcccagagccttaagaaggacgtgagaaaaaatcagactgttgcaagtccctggggtgcctgagttggatggggcatgggtagagaagcagtgcttctcctgtgggtaaggcccaagcaggtggaagagcaagttctgtcctcagagttctccagactccagggggccagggtgtccttgcccccaggccgtggggggatgtaggaagatggcagccagcctccttagctcatgaggagaatatgttctgggtaagtccccagagtgaaagccgagagctctacatcttcccatccagaccctgacaactgtagggccagggtgggttcagagagtccacttgatcttgggggctgagttttggagttggagggggctggaaggccctgcaccccctcacttatacaaatgtcctgtgggcagagctgtgcagggtagcttagaagccatcctgaactgaactggtgagaactgaataggtgagtgggtgagatcttgataaggtgacatgagaccttgatcaggcgacatgagaccatgattaggtgactcgactgctctgagccttggcttcttcaaaagggaaaacagaataaggagaaaagcctcagtattgctggaggattaggtgtttccatcctagaagttatgaaaggaagttgaggacgtaggagttggtgaggggcagcttgggtctgcctgggattagaacacccctgtggtattagggaaagtcattccaagaggctggggctgccctggagacctggagtcctagggcttcttaggctccaaacctttcctgggcctctacatatctaaggagaaatgaccagacccaggctccagagcccagccctgcagcacctgcagcgcaggttaagagggggacaatgacacatcagggctgctgcagggatggtcagggagcaagcggagctgggcagtacaggaaggagcgtcttgcctattgcatcacagatgttgtcttttcagtggccaaagccctcgtctgtctattgttttatgttagttttcccctcgatgttttataatggaaatgttcaagtggtacagcaaatatctatatgccatcatttaaagaaatgctttgacatgttcacattttaaagaacttatccgagcagatagcgattcatgaatctggtagctccccacaagaggcagtttggggctctgcaagggagcacaaggggaggcttccacagggtgaaggcagaagtggaataaatattacagatgctttggttgcttagcgtttcggcccttgcatgatttgggacatcctagtggaaagttcgagaccatgcaactgatgtccagttggccatcagtggttggctggacttaagcttcggtttcttttaaattagctgcttacagtaaatgagtctgagttagatttcaatttgctcttgtaggaaatcagggcgttagagccaccttagtttaatggctgcctccctagattctaccacagacattttattacccctttctcatctcagctccgcctcactagcctcttctaccctgcaagcctcctctcccctgcaaaccaacacatttttaaatgcacttcaaagcaaattgaaccttgactttttattcattttatgtattttcattttacttttttcttaaatcagaggagtaaaacatactcatttttgtagaaatgtgcaaacaaaccttttccaaagcttttaaaatccagcctcctttagtaacaaataatcagcattgaatgtctagccattgtcacctgtgtctgtgtacacgcagggaggtgcacatataggagagatccatccacacatctatgggcaccccatccatttgtccatcctattgtcagccgtttattagcatagatgataatttgcattttgttttactcacttaaacatacaacacaaacatccttcccagttgaagtatactcattaaactcatccttttaatggctacatgtagtctggggatccctaatctaaaaatctgaaatctgaaatgctccaaaacctgaaactttttgagcaccgacacaacaccacaagtgaaaaatttcacacataagtacttaacaccaactttgtttcatgcaaaaaattatttaaaatattgatatagttacctttaggctatgcgtataaggcatacatgaggcataaatactgtgtttagactagagtcccactcccaggatatctcattatgtacatacagatattccaaaatccaaaaagaatctgaaatctaaaacacttctttctccaaaactttcagataatggatactcatcctgtagtagttcttgatgatttactgaccctttgtgaggcatattttaagctttttctgtttttacttcaatattgtttcagcgatattgcgataaatgtttttgaaaacgcgttcttaagggcctaaggtgcttttttgtttgtggataaattcccaaacttgggcttgctgagtcaaagggcatatacacttgtttgtttcctgtattgtattttttcagtaccttttaaattatctaataagtacgtccttttttcactacttaattgatgtataattaacatataatgaacctatttgaagtgtatcatttagtcagttttgacacatgcatacccccccgaaattctcaccgccacctgggcaacatatattgctgtcgccctcaagttttcctggtgcccctttgctccccagtcccctctgcattcccatatccagacaaacatggatttacttgctgccaacactatagattagcttgtagcttctagaatttgctataaaagaaatgataccctttttttatctgttttcttttgcccagcataatgattgtgggattcacccatattgttgagtgtaccaatagttcatttattttgtttgctgagtagccttccattgcacagatggaccacaatttgttatccatgcacctgtcgatagcccttcaggttgcttccagtgatgaatattacaaagaaagctgacatgagccaggtgtggtggctctcggctgtaatcccagcactttgggaggctgaggtgggcagatcacctgagttcaggagttcgagaccagcctgacagacaaggtgaaacccagtctctactaagaatacaaaaattagctaggcatggtggcggatgcctgtaatcccagctacttgggaggctgaggcaggagaattgcttgaacccaggaggcagaggttgcagtgagccaacattgtgctactgcactccagcctggactacagagcgcgactgttaaaaaaaaaaaaaaaagaaagctgatatggatatttgagtgcaagtcttcgtgtggatgtgtgtctttctttttgctggagtaatataatacctaggataggaatgtatatttaacattttaagaaatgactcaactgttttccaaaatttaaatttctaccagcagcaagagactaccagttcctccacattagtggcaacaattggtaaggagagacagttaaattttagccattcaaataggtatgttgtggcatctcattgtgattttaatttgtatttgcttaacaattaatggcgttgagcatcttattatgtattcattggccacttgtatgtcttctatggtgaaatcgatgttcaaatcttttgctcatttgttggggaagggaggcagttgtttgtcttattattgataaagtaaaagttatttttatgttctggatgtaagacttttgcctgatatatgtgttgcaaatattttcttctagtccatgccttgtcttttcatgttgtcaactgtgtcttttgaagattgaaagtttttctttgatgagtccaaatttatcattttttccctttacgattcatgcttttagtgacacagctaagaaatctttgctgatctcaaggccacaaaacctttcctttagtattttgttctagaatttctacagtattaggtttcacgtgagtctatgatgtattttcagttaattagatatccagttgagcccacgctagttgttgaaaagactttccttgttctagcgaattgtattggcatcttgataaaaaagcaattgatcgcatctgtgtgggcctatttctacacagtctattccactgcgttcatctatttgtctgttttctacccacatcacactctcttgtttactacagtttataatatgtcttgaaattatgtaatctgagtctaccaactttgttattgtttatcaaaattattttggctattctagttcctttgattatccatatacatttttgattcaaatcattgactttacaatcagattattgattgggattgaattgaatgcatagatgagtttgcagacaatttacctcttaacaatactgagtcttccaacccatgaatacgttatatctctttacttatttaggccttctttgatttatttatcagtgttgtgtggtttcactatatagatcatgcaaatattttgctaggtttatacccatgtattttgtggggttttttttttttggtgctattgtaaatggcacttttttctttaaattttaatgtccagttattcattatgttttgatcatatattttacaacttgctaaactccttcatttattctagtatacatttggaagattccttggaattttctaaaggggtgttcatgttgcatttcttgattgacaacttaaggatgctatttttttttcttctttttttgagacagagtctcgctctgttgcccaggctcgagtgcagtggcgtgatctcggctcactgcaagctccgcctcccgggttcacgccattctcctgcctcagcctccggagtagctgggactacgggtgcctgccacgaggatgctattttttactcttgccttattgctcttgctagggtctccagtgccttgttcgtgatcttagggggaaaacatccagtttaccattaaatataaagttagctgtagatttttttttggtagatgccctttatcagttgaaaattcttttctattcctagtaatttgagaattttttaaaaatcgtgaatgagttttgaatatcgtcagatgcatctactaacatgatgttttttcttctttagtttgttaacatagttaatcatattgactggttttctaatctcgaaccagccactcatttatgggttaaatctcacttgttcatgatgtattagcctttgaatatgttcctggatttaatgtactggtattctgttgagggcttttgcatggttataaggaatatcgctctcaagttttcttttcttttggttttggtatctaggtaacgtctacctcataaaagtgttggaaagtaattttttctcttcctattcctccccctttctatttgctgggaaaagtttgtatggaattgatattatttcaagtacttgaggggctgagaagtattgcgctaagcatgaaaggagggctggttgggcttataccttattcctacttttcgactgagcatttcacagttttgtgtcatcagaggaaaacgataactgaagtatcagaacatagattattccagctgttaatgatctatattagaaagtattcacagcctcaaagatgacatcacttgcctgatgtcagtgattccagcaggagctggaatcatgagggtgcattacccactgctgcctccagggggtgctgtgtgtcaggcagcagagcctagggcctttgaacctggatgagttctgaggtgtgtaatgggttcagaatagtgaccaagttcccatcagccaggggctcatcacccacacagtggttgggtggaaggatagaagccccttctctgcaggatggaagcccctcggaagcacatggctgtcctgcccttccctgcgcgacaccttttctgtgcagtgaggacagaagttcaagttttcagacagagtacatttcagccagagatatcctagagactgaacacaggagggtggggccttaggctgtttggaaggcttgatttgcacaaagaaatgaggaagcaatttgcatctggagagaatgcatgaatgacactgtttaacaggaaggtaagaccacaaggctagcgacccaggatcggagtcgggtccctgctgtctgaatctgcagggcatgtgccgtgtttatggatgatgccttcatcactccccacccaggccatttctcctaagccactgctccttctgctttggggatgagaaagctggggctcagggagagcacagaacttgctcaagagcacagagctgaggagacatggacctgctaaagggagagaggatcccacacacactgccctgagctttggttcctgtttgtgtcgtaatcccaggcacggacttgtggcaggaggtggggtggggagagaggctccagcagggactaggacccctgtggctgtggcaaggctgtgtctccagtaactgcagggcattagtctagaggagacggaggagatggaccccgcactgacagatgcaggggtgaagcctgaacccaacaggcagagcagcccgggcgcccttcaggaatccaggccattaggtgggatgacacagggggcttgggagtcgttagtggaacacagccttgggaatctgacagcaggacattgcagggtttgggaagcagggttcaccggggaggcctgagagcagggagggctcagggcccagggctggcttaaagtccagggagcgaggctgggtccactcatctggatgtgggctcaacatgaggaccaacttctgggcaaggcggagtatgcagggagcagggggtgcgaagtgtggccaggcagcaggaggcagccttctctctctcttgcctaaggtatctgatgtggaactgattcaaggaagtgggaatgttggtccaggggctcggggtggtctaaggcaaggaggtccctagcaggcactcacaggagtcatcttcctccctgagtgtcctccttcatcagcaccctaggcactttctagaagctgagcagggatgctgaggtaggtatctcagtggagcaccacatccacgaagccctgtgccgggcgctgccctgacagtcctgtgctttggaaacctgggcttgtgtgtcctgagccttgctgcagagaggacttggtctacaggggcatctgtttccccaccggtggatctgtctctgagaagaaaagcctggattctgtcatctgaggacagcctaacagtgaggaattggaggagatgctttgactcataaaagggaagaagtagctgggacaaaggcagaatggctttggaaaatacttaccgcttctgtttgtaccctgtcatgaagattgtctcgtttaatcttttttttaaaatgattttcttgagatacaattcacccatttaaagtatataattcaatgatttttagtattcacagaaatttatgaccattaccaaaatcaataatattagaacattttcatcacctcaaaataaaaccctgtaaccttcagctcttacccactatccacacccgcatccctgcctcccagctctaagaaactactcatctactttcgatttctatagattttcctgttctggaatttttcacgtgaataggatcgtataatatgtgactttttgtgactggcttatttcatttagcaaaatgtattcaaggttcatcaatgttgcaggttcatccatggctcactacagtctccacctcctggactcaagttcactcctttttatggttgaataatattccattctatgcatatgccacattttgtttattcattcattaactgatacaaatttgttttttttccaccttttggctattatgaataattctgctataaaaatgtctgtataagtttttgtgtgaacatacattttcatttctcttggatacatgcctaggcatgggattgttgggtcatatggtaactctatgtttaactttttgaggaactgccagttttccaaagagactgtataattttgcactcccaccagcaatgtgtgagttctgatttctccacaaccttgaaaacaattattatccaactttttgatcatagccatcccagtgggtgtgaaggggtatctcattacagcattgatctgcactgcctgatgactaatgaagttgggcatcttttcatgtgcttattggccatttgtgtatcttccttgcagaaatgtctatttagatgatttgcttattttaaaaattaggttatttatcattttattattgagttgtaagagttttttatatatgctagattcaagtcccctatcatatacgtaattagcaagtattctctctcactctgtggattaatctttcactttcttgaagatgtcctttgaagcacaaaatgttttcattttgatgaagtccagtttatctaattttgccttcattgctcttgatgtcatatctaggaatctttttccaaagccaggctcataaagacttacccctatgttttcttctaagagttttagctcttatttttaggtccttgatccattttgagttaagttttgattatgctatgaggtaaggaagcaaatttattcttttgcatatggaaatgcagttgtacaccatgttctcatttaatcattacaatccagagatatcatgagcctattctttaaaataaacatctcccttttacatccccgctttaaggagtcttatggggagatgtaaaatggagatgtttattttaaataataggttcatgtgattgtgggagctggaaagtctgaaatctgttgtgcaagccccagcagactgcaaattcaggcaagagtcgatgctgtagtcttgagaccaaatttgacagggcaggcagctggctggtaactcagacagggtttctctgttgtagtcttgaggctgattgcttcttcctcaggaaactgctcatcaggccttgaactgattagatgagacccacccacattatggcggataatctgcttcacgtacaggctactggtagcaaaagtgtatcacatccactaaatactttcccagcagcatctcaactagtgctgcaccaaacagtttggcaccatcggatagtcaagttgacataaaatcagtcatcacaggtagtatggttgccgttttttaggagaagaatctgaggctcggagaggttaaaagatttctccagaagcacagtcagtctaaacataaactggattatcacgtgctgggcgaggagtcaggaaagggaaatgggaaaatgttggtcaaagggtacaaaggatacataaattccagaaatcttctgtgtagcctagtgactgtggttaataatgctgtactgtatacttgaaaatcataagagagtagatcttaaacattttcaccacaaagcatgtagggtgatggatatgttaattagcttgattcaatcattttgcagtgtatacacaaacatcacatcgtatactgtaagtatatgcaattttatttgtcaatgacatctcatgaagctcaaggataaaaacgacacttggaccggaagctggctcctcaaggcactccgttcttatgcccatattaagcctctctgttctgagaacagtccaggcttagggagcacttgaattctcagaactccaagtaggttccaggaaaaaataccatctcattgatggcagacacacacattgtgtgaatgactagagtttctctaaagcatacattcctcctctcactgtgcctgaactcttagtcacagcaatgtggggtgccatcctcgtttaggaaagttcttccatgacgtggcctctctgtttgtgtttcttcctgctgtttcccctaagcccatcagacgtatgcgtgtgtctgaactccagcaataaacaggcattaggatcttttccctgagagccgcgggcacttggcttgtcttcgggaggctgtggctgcctggcagacggagggcctgggggtgtgcgcgcggcaacttccaactcaggtatgactagaaaggccaatggcactaggagagtgtgggaaagacaatgaagagaggaaggaaaaaaagaatgaggaacaaatgaaggtttcaggtgacagagaacgccgtggctcaaatgttttcctgagcattacacacaaagagaagcaggcaaggacagaagtgcaggcttcccgagaacctgggaaacatttgtgtatgtggcactttgtggatgatgagcaaggacccagtgatccatgtctcctggctgtgaccatgcagccagtatgtgacctggtcaggatttgaacacaggcagggccaaccctccctccgcgccctgacagccaccctgctgtttccagttggcctctgctattggctcctgagctgcccctgactggggatactgcataacatcgtccagtaccctagtactagttacacaggaacaacaggcgttaaccagaaccatgccaggcaaactaggatgatggtcactgagccagaggaagaggtggcccaaatactgcctagtgggagcattgtccagagaagggaagaagaatggtccagcactaacatagatgaccacaaaaggtgccagaggttgggctgcagcatggcctccaggatttgagtgtgatgtgggggtactgagtgctcacacactgcccacctggctcacatgaggtggtcacacctcgggcattgtcggggatttgaaaaatgtttgcagcttcatgtcttttgggctgggtctcccttcattttgtgtccactgctgagcctcagagtgcccggtccagtttggcctggggacagtctgttgcttccaagagtcatttccagggtcagcttcattttactgatgctgagacctccaaatgcccttagtactagggatgtcaccccccaccaaccgaggagaaatgtcaatgctcaagttcagaacaccaggagactgggaatgcagatggactttgagacctctcttccctagctttctgcctacacactctcctaagagctaacaggtcagtaagagacatcaggcatgaagatgtcagtgcaatggggggacaaagtcacccagaaccacctactctcaacaccaactcattcacttccattcttttttccatgtatggattttacaaaatcacagaagaaaaaaagaccattatcaattaagtgacatgtctttttgacattcttcttcctgccatttgctgtgtgtctttctggtccttttatgaactacttccttatatataagcatatccttggaacacagatgctctgtgggtttttatgtatgtgccagatatcacatgccactccgcaacatgctcgttttgctcagcactatatttttgatatgtagtcatgtgggtgtgcatcaactaggatgatttttaatggctctacattatgtcaccatagccatgtatcactctttagtcagttcttcactgactgatggatatttggtctgtcacagttcgggtttccagtgaaacagacagagatgggactggctgcaggaagcatgccggtggcaccctagggagctgcacttgtcagaaggggagggccttggactgcacagagagaaggaaagtttgagagtgatgcagctgccatggacctcagccaattccaaggggagtggggttgtctcttcaaagtcaccccaaattgaagccagagccaagccttcatgccccctatgccattctcggatggagattgtcctcagggacgagatgagacctgggcaagttgctccctataggctattgaaggcaattccaggggaaggggtcctgatctgggcaggtgctcagcacccactatgaggccatggccagcctttcatgattgcaagtgatgctccagtgcttctctctgaagtgcctgtttgctcatgtgcaagcatgtctccagaacgggcgtaaataaatggagtttctaagtgtttcatctctatttgatgctgctgaattgtcctccaggatgactgaagccatgacagtcccaccagccactgatgatagtgctcattcctccccttaccagtgccaatatgctgtattgttacatgctttcatttttgcaactctaatgaatatagaacggaatcttgttatcatttccatttgcttttccataattataaataaggctaagcacacacatagacaacactctgatgcaaattctctcttctacttctgactttggccctgaatgtaaaccacagcatcctcagacacagtttcttctcttcctttctttctgcctcagtttgcccaagaagagagtgtttcctctgagccttttagtagtttcagaagttgcctaatgcatcagaaagtcctgttgcatgcatgtgtgagcctgtgtgggtgtgcacatgtgtggtgcacatatgtatacatgcacacatgcatgcatgcatgtgttaatgtgtgatgtgtccatgtgtgcacacaggtgatgtgtatgtaatcagtgagaagtttctgttaaagagtcttgcaatactcatactctttgaaagaggaatcttaactcagagcctctatcttaaaaagtgtatgaaatacggaaagattgaatatattaagttataatgtaatatattaaattatatatggtgtgtccatgtgtggacgtgtccacgtgtagtgtgtggtgtgtccacgtggacatgtatatccagctacgtgtctagggcgggtatgggtgagggagctgtcattcctggtcaggctctgcttcaattcaaacctgtgttgtttgaggcaaagaggctggtatctggggtgactgaagacacacacagtcttgttttctttctatctcctgctgcccctcagctgtgtgtcccagtgacttctggagaaaaattggatgctctgtaaccctaccccaaatcaggtccaggaagaaagaggaaggaactaaccacagttcattcaattattctcctattgttggtcattttagatagttttctgtttttcagtatgaaaagcaatgttcggttaacatcaaattatactaaattaaagctaaacttattttttaaattaatttaattaatatactgaatctttccatattaaatattgatttttaagatacagacttggagtcaagatttctttttcagagagtgtgagtattggaaggctctttaatagaaacttcttgttgatctgatcttcattcctttggttagtagtaagagcagctgccttccactgagggctcagagcatgccagtgccaatgcctgcgtacgactagcatctgtgtgaatctcatcttcccatctctgggctctggtcagaatttgtgtagtagtagtagtcccagcttcttgggaggctgaggtgggaggattgcttgagcccagaaattagaggttatagtgagctaagattactgcactccagcctgggcaacagagcgagaccctgtctcaaataatcattttgaaaatcaatgcagagttgtcacaattttattttgccaagtctgaacattattaaaataaaccccacaaacctattacctactgtctctattatttcataaaaagtaggaagatatttgaacactcctgaaactgtatttggcttttacaaacaatatttcattgtcttcatttttctcactttgatccagaaagtgacccagcccctggcgcctggttggctagaaccctgtccatttctgcccaagcctaaccccctccaccctccagggagatggctcatatatcacggctctccaggaccaaggggtccctggagtcagagcagaagctcatgggagggtgctgaggagagacagattttggctcaggcttgagaacatcctcctgataaatgggcgtgttcacatgaaccaggctttctgggagagtggtgggaggctgagccagaagtgttccagggaagctgaggccactgctgtgcaggtttctgcctggagtaggtgctcttttccaaggttcagattctacaatttgtaaaggaaaagaaaaatgttctgaaggtttgttcagtcctaccctgcataaaccacctgtgtttcccgctagcttgaggtgtggcctgccttgggcatggtttccttggtgcttcgggagaaggccagggaagaagtggcagcagttccgacccctcccccaactcgctgctgcacggatatcacaggctggcctttgaaagatgagcagtttctctgaccttggctgacacactggagaagcctcagggcttcctcactctgcacctggggaggcaggcagggctgttggactccctgggcaagctcttagcagcaacgttcagattcctgtcttcccaggaccaagtcgcccctgaggcctgaaacagctcccaagtatctctgggacttgagaaaccaagatgtcaccccctacatgcatttagaattggctgatcgttggtggagctgagtgcagaatgaaaacatgggccccttcttctaaacttattacacatttcaagatggcaacagcagaccattaaaccaagcgcagagcctgagcgcctagtgggccacacacccgagcctgcgagaactgtagcattctcggagccaggccccttatgggtgaaaggccagcatggtcctactggcctctcctccatctctgcactgtcacagctggaggccaggcctgctgcagggcttgtcagggaagggagtgcacccccagatgtgacagtcatccgggctccgctgctgtgtgcccagcactacctcctccacctcccttcctcatctgcagaggagcaaacccacctccctgagggctgctgtaaggacccccagagatgatggcgtggagccttccaggtccaagcgggcctatcttaggggcccagaataagaggccccaggggcaggcatagcagaaatctaaggaagattctgaggaggagctgacatccagggcagagacagcagatcagaagaaccagatacggaaccaaagccttggtgcccaacagggaaaaagagcttctgagttcagtggggcggggcctcccacttccacctgcgctggggagttaagccaggcttgaaaaagacaaggctgcacactcccaaaagtactgaccagggattcttctcttccaattctggtagaattctgaaagcgggacagccccagtgtttagtgacctgctaacaagacctctccttctcaagtgagtagtgccctacaggtgccaggctgaccagagattctcacactggcggggcaagaaaggcaatgcccagggagggtggtccctaggtggagaagagcctagggaggggagagtccagggagggaagagtcaagggcagagagaacccagggagggtagtgcccagggacagcaatgcccagggaggagtgatcccagagagggcagagtccagagagggtggagcccagtgtgggtggagaccaagatggggcagcaccctggtagggcagcattcgcccaggagagcatagattgtgtttgttttatcttttttatgccctcgttttgatttttcctttcagtgtgactttaaccttgacactgaggaaagcaccaggacagtagtccatacagtagagagaatctggacttggtgtcacaaactggagctcaaattctggctccagcagttgctggcttgtggctctagcaaagtgtgagggctccaagtgcttctgtctcctatgtgattgtaaaaggtaggataaagactcctactcatctgctggttatttagaggcactggaggcagcgctgggccagggctggtgctcggaggtgctcctggcagcctctctgcatccccattgtcttactgtctctgtctctccatgtgtctcgctgctgctttctacatggcattccccagcctctctccacttgctgtggtacagaggtcaggtcacaatgaggggcagaggacagcctggctatcctgccaactcagtgtatggctggggacaggcctctggctttgctggacttccacttcttcatccatgtgacattgagaagatcaccatcctgatggaatgcaagggaaatacttcaggaaacattacgaatgcagccttgaacgtggcagtcatcaggcagaggaaatttgatcacaagaatcgcccagtgacatggaggccagggaacatgtcttgggtgtttccttgtatgttctctcactgcacatctgtcaatcatgttggccctccaggagtgaccaaggtgagaggcacacaggccttttccccaggggactcaagacaagatgtcagcagctctcagagccaggccaatgatgaccgtgcaggaggaatattgtggccctcctcagagccagagaggtccatcaggagcatcaggcgggggtgggggtggtggcactgtagctgggacacccagaagattggttggagctatggggctgggattggggccagcaaggcagcccccgctgtggggtcagagaacaagaaggtggtggtaggctggagaggaggggaggagttaaggattgtcttttagggcaattcagggccagcttctcctgacgtggggaggtagaggaaggcagggaagtaagtgtcatctttgacttgcaaacctctacacatagacgtcccaccccctcacacacaaaagctcatacacgagcactccactcaccccagtgtgcacacaccacatcactcaccccgctcagtgtgcacacaccacgtcattcaccccagtgtgcacacaccacatcactcaccccagtgtgcacacaccgcatcactcatcccagtgtgcacacacatcactcacccccctcagtgtgcacacacatcactcaccccagtgtgcacacaccgcatcactcatcccagggtgcacacaccgcatcactcaccccagtgtgcacacaccgcatcactcaccccagggtgcacacaccgcatcactcaccccagtgtgcacacactacatcactcacccccctcagtgtgcacacaccacgtcactcaccccagtgtgcacacaccacatcactcacccccctctgtgtgcacacaccacgtcactcaccccagtgtgcacacaccgcatcactcaccccacggtgcacacactgcatcactcaccccagggtgcacacaccacatcactcaccccagtgtgcacacactgcatcactcaccccagtgtgcacacacatcactcatccccctcagtgtgcacacaccacatcactcaccccaatgtgcacacaccgcatcactcaccccctcagtgtgcacacaccgcatcactcaccccagggtgcacacaccgcatcactcaccccagggtgcacacaccacatcactcacccccctcagtgtgcacacaccacgtcactcaccccagtgtgcacacaccacatcactcaccccagtgtgcacacaccacgtcactcacccccctcagtgtgcacacaccacatcactcaccccagtgtgcacacaccgcatcactcaccccagggtgcacacactgaatcactcacccccgtgtgcacacacatcactcaccccagtgtgcacatcacatcactcactccagtgtgcacacaccgcatcactcaccccagggtgcacacacatcactcaccccagtgtgcacatcacatcactcaccccagggtgcacacacatcactcaccccagggtgcacacacatcactcgccccagtgtgcacacacatcactcaccccagggtgtacacacatcacttaccccagtgtgcacacacatcactcaccccagcgtgcacacagatcactcatcccagtgtgcacacacatcactcaccccagcgtgcacatcacatcactcataccagcgtgcacatcacatcactcaccccaatgtgtgcacacatgactcactccagtgtgcacacatcactcaccccagtgtgcacacaccacatcactcaccccagtgtgcacacacatcactcaccccagtgtgcacacacattaccccagtgtgcacacactgcatcactcaccccagtgtgcacacacatcattcaccccaatgtgcacacaccacatcactcaccccagggtgcacacacatcactcaccccagtgtgcacacacatcactcattccagtgtgcacttcacatcactcaccccaatgtgtgcacacatcactcacaccagtgtgcacacacaccactcaccccagtgtgcacacacatcactcactccagtgtgcacacacattactcaccccaatgtgtgcacacatcactcaccccagtgtgcacacacatcactcactccagtgtgcacacacatcactccagtgtgcacatcacgtcactcaccccaatgtgtgcacacatcactcacaccagtgtgcacatcacatcactcaccccagtgtgcacacacatcactcaccccagtgcgcacacacatcactcactgcagtgtgcacacatattaccccagtgtgcacacactgcatcactcactccagtgtgcacacacattactcaccccagtgtgcaaacacatcactcaccccaatgtgcacacaccacatcactcaccccagtgtgcagacaccacccacctgcatccacccagtcctgagatggctgcctgcccctcccctctgcctccttaggaaggggaggcccaacccagtggggtctggagggtggggtaggcagggtatgagtctatagggtcctccagattgggtctcacattcaggaggggctgcaaattagacatttgactttatttccgagtgaaattttcaagcaggcacagaagcacaccaccaggactgaaagaagatgctcaacacccaacttggaatagcattgtaacactacactgcccggcatgtagcaggaattcatattttctataacgccagtaattaaacaagaatgtttcgttgtatttgtgtgttaaagttgttcattggttccatgtaaacatttaacataacgttttccccaccccccactttttcttaaataaatgggagcttcaaccacggggagaggccctggcctctctaagcctcccctaggccctgctctggctggaggtcagagggccataggtgcactcttcaccactttcagactcttcctcataccgccccgttccatgtgtggcctggagagacagaggagagggtgaaacacagagcaaatggaagccttatcttcccttgtgttcggggaggctgagtctggtcccacagtccgagcccaggcggggtgctgggatgcacgtgactcaagagagccggcaaatgcaggcagagccagtgatagccgataaggactgcagctcttccgaggctggagaggcctcgcccaggaaggctggagtcttgtcacttaaggacatgtcaccaaggaataaaaatagatatgtttcaaagaccaaagccagagcacatttaattccaacaaattcaaatccaggcccgtctcccatgaggttgtcactggggggcaccctgggcatggcatgctggtgagctggctatgcagagtaactgcagaggtgctggccacaggctgccccatccctcaggggaaagtgtgcccggccctctcaaatggtcacatggtttcagtctatggacagtgaatggccctgtgtgcaccactggccgtgggagcactgcaccagggggtcacaataactccagccacagtgtatcatgcagcccacagggctgctgtcctgacctctctctctatcctgcagttggcctggggttatttttcagtgcctcaggggtcatattaaaaagcatgtggccgctgagtgagcactggcaacagtggccagaccacgccctgtgtgtgacaagcagcccagtcacacctgtgactgatgggcctcagcctggcctggcctcaacactcctgggctcccaatgtctcactgctctttagctggagaggacctgctaaactgcagcagggcacttgggaagatcctgggctttggtgtcccacaaatctgagttggaatcatgccattgatcaatgctacttgatctgcctgtgttttatgtctctaaattggaagccatgcccctccaactgggttgtgggaaataacatacaatgatgggtgtgacacgcggcctgctccttccctctactccccaagggttttggagcgagctggcctcctccacctctctaacttccatcagtctctgcagtgacctgcccgcctgtgctcctctggctcactgctgttgttttctgctgactatggattatttttccccctgtctccttttcatcacctccttgcatcccaacaaccctcccaggctttcctgttgtgctcaaatccccatttccttagccttccctggcagttgagctcagcggtgtatgctttgggtggggtgtggggagggagagcaggctccctttcctcctccaggctggcatgcagattgaatcagtccttgttgtgcccaggggcatgcaggacctctcatgtggagcccctttggcctgcctccccagccccgcaggcagatactacctgcacccacactctgccacgctcatgccctcgtaatggtacttgagggtgggcacccccatgtcatccttgtagaggacggagatggggctcagtttggtgggcacacagcaggccttgcccacctttgtggggaacttgagatgcaccagggtctgcacgatagcgtgtttcgtcggcgtcacatcgtcagccaaggggaagaagcagccgcccttacactcgtaggcttcatactccttgggtgcaatgatccagctgtcccagccgatgtcctcgaagtttacccgcagggaggtcttttgacagtggctgccagccccggcgctccttttccgcctggctaaagtcgaccccgcagccacgtggccatccgtgtcctcctcgtgactgctctcacctgcctctgtggagccgtccttggacagcttcttgagcacgctctcttgttcatggctgatcatctccctcagctccagcctggtctccttggtcccactgctgtggtcattggagaagacaacaaagaagggcaggtttctggaacctggggggacactgatgtccagcgtgtcgcagcccttcctgtggctctccacagtcacttccagcttatttttgctcttggtggagtcggaccggacccagcgcttcacggcgctggacacttccaaggtctcccagccctcatcctgaatgtcctgggacaccaggaaggtcttggtctctgtagcactatcccaggcatctgttccatccagaacatcataaatgaccacgcttcctttcaggtcatgagaggggtccacgtgattttgacaggagacatagagtcggagctcagctctggtgatctgctcatgcctaggaatggagatgttgaagagcaagatgtgcttctggaaggggaagtcctctgtggcagttatggagatggcatctgaaatgcaaacacacgtggtgggcatctgctggagggtctgtttccatgacactgaagctgagtctcagggtttagacagaagagcatctgggataacaattttggtctgtattatctctatttggtttcacccaagcccttaaagtataagagtattttgaaaggtacacttaagatcttccaaaggagatgcctccaattgggattgagagttcctactgtttatcgagcatctactatgtgccaggcattacactgggagctttgcagaatacatttcaccttaatcctctcacttaccctgggaggatctaattattattccacatttgcagatgtggagactgggattcaaggcagttaattgccaaaatgcatacagctagttaagtattctgggacttactagcacacagctattgagtacataaagaaaacagaaaaactcactgtcagatcctgagtgaagatcctgagtgtatgaatttaaaggagagatcctgggtggggacagtgaaaccccaatattaagacaatatcaaaaatctcagcctctaaacagtgtataaatcgtttgaaattgtaatttccaaacaaagcaaaagtggataattggttttagtgtttcaggaacaaaatctattagcttcaattgctttgtcatgtcaagcaaaaatggggcttggcttttagccacatagttatctcgatatcccatttatcctgggctgacactttgtcattagcacgctcctgctatacaatggctggttcacagacagggaaaagaggttgcattttttcagcacttgctatatacccacatgtgtggagaccctgtgctatagggaaacctagctggcaggttttgaagtgccagtcctgcctctgcagaccagttaggtctggcctgggcgtggtatggagccaggccccttagccatttgcaagtctcagacccaggaagggagaggctctgtgctcctggacattcagagggagacagcagcagcaggaaaagccagctctgcaggcagacaggtttaacacttcctaggtgtgcaggcttaacacttcctaggtgacatgggtgggtacccttggtggctgcaagctttgactgaacagttttgctcttcagaaacttatttcccctgcatcatgtgagcttgtctgagttaggacataggtcctaggtccgtgtttgttatcttctagtccttctaaatcagatatatttctatttaaaaacaattaggttctctgccaacacttctctgtccaagaattttatctgatttttaaaaccgtttcataagaaaggaatagatgtgctttgaaaatttaaaaatatcccagttagttggaggtgaaataggttgcctgttctgttctgaagtaggaaggggacaggaagggaagggggaaaggaagagaagtgaatcagaggggagtgatgcaaagaagaggagagtaaagagaaggggtggaaaaaagagagctggcatccctgtgcacctgctgtgtgaaatgtggcacacagcttggggaaggtgaatccttcacaacagaagtgctgagtagaactctcagtaaccatggaaatgttcttcagtctgcactgcctgatagggaagccattagccacgcatttgaaaggaagctggtgaggctaaagaaataagttttaattttatttcattgtaactaatttaaatggaagcttgaagagcctcctatggccagtggcctccaccctggggaaagcagctgtggacctgtgagtcccaccccagcgcgcatggtgcaagcggagaccctaccttccatgctgaagctccgcacaatgttggacgctggcgtagtcgacttatcggacgtgtacctgttgtacaggtcaatcatgtactgcggcggctccaccctggttttgtcctgcgaagggaccccactcaggttaaggctgcgcaggaaatccaccttcacgttctccagaaacatcttcaggttgaaggtgtgctcaggcagcccacctccaggcacccccagtgggctgtgggcgtttcccccagcagaccctcgtccccagctctgcagtggcttcccctgtagggagccagccagcagggacagcaggggcagggccacccacagtgccccaggacacatcttaggcccgcgcaatcacccagagaggagactgcaggcggccgtgctgtgttagcgggcacggggaggagctgggaaggagcgggccggcatctccctgctgtttgctctgaaggaaccgtcctggccagcacccactctcacccgctgccgggctggattgtcctccacttgtgcttatctggtcctcgatgccgcgctccgacgtcttatctgagggagccttccgttaatgaaggctctataaacatctgacaaacacacagggcatgcgggaaggacacggcctactgtaaagaatctgtgcttctccagggggttattgccccctaattaggatactttctcatttccttgccagggctcttcagaagaatctccaggcagggtgacatatgctccatctcctgggccacaggagtgaagaatccaggaaacaagaccaagtagtcctccaaatatagaaaggacagcacaagatcacagtgaaccgtgggggctggggagatggggagagtgtggggaccacatcagggctcagaagaggcctgctccttgcagaatcggaacctgccagcaagcctccctgctctgttggtgggatgcactgctgagcattagagatcacgagtgaatatggctcccgtgcaatttagtgcggtgatgagtcaaactagacacaggctgggatctcaactccctcaccgattccctgcaaatgtcacctggaacaagtcactgcagctcttggagcctcccattcagaagatagttataggggttaagaggatgctgtgccccaggctggcttggtggctgcattctggatgccccctctccagcccaggcctgattgagctggagctgggggaggaagccctgggttcccccagcctgctctgtcggagctccacaacacactgcagcctgtggggagctccccacatccctgcatcccagctgtgtcactggtctgttgtggggtggtcttagctcacaccaacctggcagccacctggcccacactcatcagcagggagaaccacgcaatctggtagacaggggagtaggtgggttgttctgagagtggtacatgccaagaagatgatcccctggcctttggaggctgataagctgtggcccaggaaagggccccagggactgcgttaagagcagtatgtccacacttagactctgtccatttccatcacgtgtggctttgagcaaagcaaagaaggatcatggttagaaacactctggggtatgctgtgcctggtggtttactctggggaaggtattctatgctggtgaggctgtccgggagaggctgcagagagctgagcaggtttaggggggtgcaggaggggccacagcatgctgcggtcagagattgcagagggggatgggtgaaatcaggagcccctgaatggctgggcctgaatagaacttgctatctctgtcctttgatgacatgggccaggggaagacgggaagcgtgctgcttcagaaatgctgcttgggaagaggactggaagtgtgctgggctttgatccagctcagtgcaagaattccatggggcagagaaaagatgaataaatgggtgccatgcccaagaaatggagctgcaaatgcggagtgaggtgtggtccgggaggagtgaggacagggcagatgcctgcaacatggtctggccaggagcttttcacacacgagaggctgagcagagggatagcctagtggcctggatgtgctcagggaggagcaaggggctgctacctgacgttattttttaaatgtgacatttttttcccctgttataacagtagtctatagtatagaaaacttgggaaatggaaaacattaaagagaaaataaataacctacaatttaatcatccagtgatgcccatggttagcattttgagacacatccaactccacaatcctatatctgaaaccattgtggccaggattgtgttgagactccgacagtttcagatttgggggattttgtattgtgtatatgcaataacattcccaaaggggtcagagacaacaccttataatgacacacatgaatatttctgcagtgaaacaaataaagacacaaatgtccattcaggtcaagttttcccagaaaaggaattaaaagaaactctaggttctcagatggttctttacttggaggtctcagatgaaggactatggacctgactgtatccagggtcatcacagctgcctgtgggtgctggccacacagactctgacatgggtgtctttccctggagctgtgcaatgcaacatgccggtgtatatctgaaaagatttgcctcacaaactcaagatatcaatatgttcacatctctttcattgtattaaatggattgcttgaggtttcctgatccatattatcaggaagtctagtcttctccttttctgaattgtccaagtgctccatgggtaaattaagtccaaaggagatagggtatgaaggtgttagtccagcttcttcatgctgggaagcgggagggagagaggggtcccacctgctgttgcttctcaacaacactggctttgctgttgggcactggtcctacatgtctaaacggctgcttgttcttagctgctggaatgtcctctagcccaggtctgtggggtggcccccatgaggcaataaggtaacagtgttcttagacgtgtgccgggcttacccacctccagcatgcgtgtctctgtggccagtggctgggtgaaggtaagaggccagttatggttaaacaccgattccaaccagccctttctcaaatctgtaggctcttacggggggcctaggtcaccagcgggactcccactttcatcaggtggtgatttcagggacctggttaccttttcatacaaatggaccctggtccatctgagaaaatccccctaactctgggtcttagggaacaagtctcaaacttgctctgattttcccaggaggaaacagaccctggatgttccctcctgcagaaggacccctccctctgctatcaccagctttgcattgttggggcctcaggaaggagctgcctcacttgaaccacagaaggtcttatttatctctcctttcccccctcttcctccaaattgtgtactttctaattcttcaccgacttcccagggaagtcagtccacatgattattcaaagactaacgatctgaattatggtagtcttatgtgtctatacctaaataaagcaaagactggcataaaatttaagaaaatctacaccaaagtgtcttcagtctctgccttaggtttactttcgaagccacttgaggtatacatggtttgatatatacaggcttgcttctctttgacaaaaattttttaattaaaatttttaaaatgttgtcatttggattccttttgtcacaggttgcagaaaagcagaatccaaacaggcctaagcaaagtggattgcacctgactaatgaaaccttcttggttggcaacggtttggctttagcgtggcttgagctacagtacaggcaaagttctagccatgctttctcctctctcagtcctgccttacactgtgttggcttcacgctccatctctctgtgtcttggcaaggtggccgctcactgcagccggcccgcatccctttcaaatgggtagctaggtggggtcaaggaggagcaaaagcctcttttccaggaagtcctagggagtctcgtggtgtctctctgactctgattggataatctacaaacactccagccaatcaccgtggctgggggaatgcaatgtcctgaatgtcctgattggcttaggaccctgggatgggcgtggcgcagacagcacagggagagagtcaggttggcaagaaccccagaagggtctaggtctgggcactaggaggaggtactgggaaaggattgtgtaaataccttcccacttcgtgaaaagcttttcatgaacttcatttttttttttttttttttttttttttgagacgagatctcactctgtcacccaggctggagtgcagtggcatgatcatggctcactgtagcctcgacctctctggtcccaggtgatctttccatctcagcctcctgagtagttgggaccacaggcataagccgccacgccagcctaatttttatatttttttatagagatggggttctgtcattgcccagtttggtctcaaactcctggactcaagtgatctgccagcctccactacacaaagtgctgggattacaggcgtgagccactgcgtccagcccatgaacttcatttttaatgactaaacattttccagttctatggacatatcttaatttagtcaaatattttccaatggtaggacaatcaagactattaagataatgttgcaagacacattgtcgtacattgttatagtgtatattttgtattattttattggacaggtcattggaagtggaatatctaggtcaaggtatacataacatttgcaaagctcttggtaagcattgctaagcggctttccacaaatgctttttaaatattcactctcagctgagcctaagaactcatcttaccacactgttaaccaatacttctttctaatccttggcaaattaatgaacagcagcaacaaaaatgctaatttgcattgctccttaggctggactatattttcccccacttttttcaggagacaaaccacaggatctgggcttcagcctccaaggaggtatagcagtggccaggtctcatcctgtgctagtccagggccgtgctcaggaatcacatttgttaccgtgctgtgagtctagggagagggccagagggcaccacagattcctgggtgttccacaggaatatggcccagggtaagcatgcaataactagtcattagtattgctcctgtcagtacatgatctttctgtgactgtttctctctcccccacccctgggacagctctgcccttcctttccatggagctgcagagggagctgtgctcttccaccaggaccacctcatgtcccttccccctgtcctccaccagggccagttctgactgccttttagtacctgcctaggactcctgcaccatgcaacctctgtgttccaagaaacagttggattcatctaacaaccactaaagggccccagggctgctcctctgctggcagcaatttgacatgcccagtgagcctgccgggccttcacagccagccaaggctcctccagggcaggcctcccatgctcgtctctgcatatgtctttgaacacctcggcatgctctgtggtgggtgctagtcaggctgggttctgccccagtggctgccagcttggccctgtcctcctgtctcttctcaatacccagacggtttcacatgactgtgctgttgttacttttaaccaaaacctcagtagggtcacaaatctcaggacttgtgaattacagaaaccatggcatcactgcaattggtacggaagaagcacaattcaatgaacaaaagaagtaaacttgactcatccatttatttcaagcatccttgaagcccgttcctccaaaaaggtgacattgacctcagtgttccttcatggagggagaaaggattcacctgagtttctgttacaccatgactccagagcatcagggaccccttccctcccaggagacatcactaaaaaaacctgttctcaaagcatggccatggagccagcagcagcagtgcctgggaactggatagaaataaaggctcaacctgaatcagaaacaatgctagggggcccaactgtgtcaagctctccaggcaactctgataggcattttgcacagtggttttgacaaaagagggaactcataagagccttccaagagaaaacatatgaatacattgcctagcatggtatttggcacatagtaaatgctacataattggataaataaacatatttcttctccatctgacccacctatccctgacccatacaaacaagcctgctgggagatgctagaggagcatggcttggggttgggctgagcgtgagtgagcggactggaggcaggatagatagaggattcatggacattattatctcagggagcagagagaaggggaatggaaatcccagaaacacctgtgaaggatcttatgtttccaggttttgataaagggaaatagttttgaactctaatgttggtgttttggtgcacaagtcacagccagagctggccagctggccagccctcctggtttctcactgacactaccttcaagccctccctggcatgcgctgctgcagacgctctttgtgatgtccttattccaccagccaagcccggctctttcgtcctgcttggtctcaaagtcagcctctttgtggagtcgtctccattcctcctcctccagagtctcctcctctcatcctccccttcccacctcagacatgcataagttcctcagtcacagctttgtctccatcctggccacagaagaaacatgagttataagcttctgctctgatgacattttatgaagtcatagagaggcacctattgggacaccccaggcaaaacacctggtagtaccaggactcaagtctccccatttctcaagtataaaggttgtattggaagccttctgaagttttctcccagccctcaagtttttagctctcaatggtactatttatgtttgtcacatgaactaatctataagaggccctgcccttctagaggatgtgtaaattcagagatgcggcccagctgcaggccaccaccctgctccctccagaatgaaacaggcccagttgagtgacatcagcaaaccgtgtccagaccgtatgatggaatcttttgggctcttatgacaatgtaatgttgacattttttgttttaagggaaaaacaagttatttcataaacatatttctttttaacctcactttactgtgtcccaacctcagtgttgttgggacaatcctagcagactggggatcactggccaggaagttcagggtcagtgccagtcatgtaggccttaaatcaggcggccttgagcatcaaacttaatgttccctgtggtcttggcaagacatcaatggacatgttacttacccttcctgagcttgtttttctgcagctccaattgggcagtaagttgcaaggctgctgtgaggctaagcaagatcctgtaactgcgtggtcttctatacattggaggggtcactaatgataccagcttctcctactgtagagttgggacatgtcatgtccccagttgggacctgccccatttcacattccaaggtcttcagggcatgcccaggaaagatggcaacaactgagcaccttccatccaggcacaggcctggaggccatgcccacagctggacccagggagagtgtcccagcctgccctccccaatcccagtaagccagacatgaggactcagaggcattccaggtatttggggggaatccagaaggcctcccagaaactgcaagtgctagaaagaataagataaaactactattggacagcccatgtttagcaaaaatagaaagggggcagttgaatgagaagaaaatgagggatggaatattcagaagaaagggacttggagttttattaagccccaatatttttacttattttgctattaacttatatcctgtcatgttccaaagagaattagacatggcaaaccaagcactaaagtgcaggccagtttgcgccagcccagcaacctatagcagcttgaagggaacaatttggtcccatgtccagttcctgtgggagtaagggaataaggtggtgagtgtggaggaccatcccaccactcccctgacctctgtcagcaggcagggccatgtgcccagcaggtaggggtccccacggcagctgctcacgcatgtgtcccagggtcacttggagcacctcataggagatgctgagcagaagctgcggagcttcaccctggcaccctcgcatccccctcacctaccagttctggctaatcattctccagtttcaatggcttcgcctccaggagttgccactcttcggatgctacctaggctcctggaatcactgtggctgcctgggcagaaggccagggaactgggactttacatcgcccttcccagggcagccagaagccaagaggccctgaacacccagctcccttgctcgaggccacactgccctgaggagtaactaagctccaaagctccccacaggattgctcccagcctgcttttctgcttcacctcacccttgcccatgtctcctgagagcacttccccatatatcccttgcacaggaatcctggtctccagagcccagcctaaggcccaagacagacaccagagctgcttctctccttggacatcccctcttagaaaaccactatggctttgcagtttcctctaagacttggggccacgtcatctgtaggtcccagctgatgggactgctatatatacacctgtctcaaattggatccagattctctttcagaaatgctggttaagcagcttcaggcactccatcataaggcaatgtaaacgaagggcataagggaacaatttggggtggcttgggtgatccttctacacacaagcaaaagagaagcaggtgcaggagaccacatggcccgtccacttcctcatgagtccttggacctcaggagagacccctacttatgttgaatctcttgctccatgaattaccagaagtaaaagatctctgaccaggcaaccatagatgtttttttaaacaccccaggcacctcccaatcaatccatgtccctgaggctaggggatgaggagaaaccccgagaggccactgtccctgtctggagccatgtccattctcaacatcagcctagcttgggtttgcaggaaccagtagtgggacaggcccctggaaagcatgggaaagcctgggtttctggagcctgggacagacaccagggagtatggagatggcttaggggactccagcgaccctaaaagaggctgagaccccagcaaccaccagatggtgtacttacagatggggagccagtgagattttgaaatgggtgacattcagtttttcaagataccactgtacctttaatttattagctttccataaaaacacataacatacacaatctacagtatagaaagtataatttacaaaaatataaaatcttggttattttttagtattcccacgttactatatgtgttatttcaatatgcatgtttaaacaacccacactcagcatgactatctctgtggggaatggtgtcaacgccctccctttttgttgttttaaaataaaatatatatattaagaaaaagaaaccaatattggctacatgtgcataccatatggataaaagctctgcagtggactttgaaaggaaacactcatttacaccacgattatcctgttttccaaaatcactatgtggcccaaagtgttctgaactgagcatttaaacagagttctttccgtgtgcagggagcgagcgccctaagatttgcatagtcttcttgctcagttatgagatgatgatcacatcaagccaatgttgtggatatgttttgttttcaagccttcagaacagtgggtatgaatgatgggccactttcaggccagggctaattcccagattccttcaggtactcaggctggcatttaaggggctagtcactagcaatgaaagaccccctaatgatgcactggcggacagctctctctgggccccagtgatgttgcccatgagctgtgctctgtgtctgcagctgcaccacaagtcctggttgcagaaggctccgagaaggcagctctgctgggcgtggcttctttccaccctggagtggtctcaccggcaggcacaggtgtccacggacatgttggggtacaccttcagaaccacattccgattctcatccaggaagaggaccccaagggagttcatcttatcgggaacacagcagggctctgggatgccagggatgatgcccacagccctgacaatgctctggatggtggcatggttggatggacgaacgatctgcaaggcagaaaaggagtagggttacctcagctccgccctcacccacccacgcacccatgccatcctcacagtcccaggccatactgctctgctgttgttccccggctgaggccacagaataggcatccacctagaggaatggacgagatcccaaggcggggcacacggttcctctaaaatcagacatacgctgagttccgggctgaggtctccaagagcccccaggccttcctgccctttggcttccctgaggcacgctgtgtccccaacacggcagggccacatgggggcgcctgagtgtcacacatccccgcggagcaccaggaagcaggcagaagctgcccagagggaaaacccagcgagatgccagcacagccctggtctcgcagtctgaggaggacaggcatgcttctcacgaggttgtgctcttgtcactgaagggaaggcctggcatgtgcgtggcagtgtgacaggctggacattgacatttcctaggggctgctctccctgcatcacccccttttttttgtcagcttagcaattttatggggtgggtattacctggactttactgggaagacaccgaggtttaaaatgactgagtaacttgaccaagacccctagttagaaagtgacctggcttggaaaactgtgcccacctctgacaagatgaaccaaccgggtcatccacttcagtgcatcaccagccaaacagagatttgtatatgtagtgctgttgaggaggaagccctcttgtgtgggtgtggtgggaagggagcagggcagggacacctgcctttgcagcgttctggctggtgtcccggaaggtggggaggcagcaagccagggtgataagctaaccgcatggccaaccagctgcaagccttcagggttccgggcttgcatctgcctgggtctttgctaggcccttttagcaggctccgtctctatgtcaggcacctccctctctcttgcacatgcacggttttgaggagaagttttgaggagaagccatttaattcccaaacacgttactgctgccccatgtctgggtctggacttccccagctggctgattatttaagttcaaattggatttatgcactgactttcttttcttggagggaaaggcatgacctgccctgggcagagtaactaagcaggaagaaactgtgtgctgagtgccgagggctgacatcacaagcagccaggctgctgcagagcaggctgcagggagagggatggactcagccacagcccagtctggagcgaaggtgagaactggaaatccttaggctggtgcaacagacagaacagcccagtgctgtgtgtcctgcagaccctgtgcacagtgaaggcctattccctgtggattcctgccctgagctgcaaggaggagggaatctacagtgggagagctgctgaggctagcactgtgctagtcacagattgccacactctggggtccaggctgggaacagaaatgagagccttggtcaggagggagcttctgggacctgccgtgtgtacaggaagcagcatctactcaacctctgcagatagttgctatgtggggatgcgtttctaaagacatggattctcctgcttttcaaaagaatgttctcattttaaagtcccaattcaaccaagccaatacttcaaaaaacacagccaaactcacacatatgtgggcggcaactaccctacgggctgccacttggtgacctatgtctacctatttcctgcctggaatagataggaagtactgttattcccattttgcagatggggaaacagaagtcctgcaggctgaggaacttgacggtagcggcagagctgagccttagaatttggcaaaaggcggaagaaaccctaccttaggcatggggaactcacatgctcccgcgcagtagtaggcatcaaaagatttcggtgagattatccattcattccagccgatgtctgcgaagtccaccttcaggtacctccgggagcacaccctcggctcatcccactgcttcctccgggctttctgcatcgtcttctcgtcaaagtccagcacctgcgaggcggccatgaacacctcctggcccttcttcctgcggtctttgcgccctggccggggtttcagcgcccggaaggggctgggccacagctggtgcttgtggaagtgctgtgcgtgggcgcgcggcggcctctcatccagccccggcagctcgttgtcctggaggggcccagtggcctgcgcggctcggcgcacgcgggggtccgctgagttgttgggggctgcgcggggctcggggtctccggcagggaaggggtcgtatctctgcagcgtcactgccacgctgttgggctccgagatggccagatcgttggcatagactaggatgtagggcgcataggggctgggccggggcacccccgggtccctctcctcagaatccagctgggcggagaggagcagctcgccatcccggcgggccgccttgacgatgggggagatgtccttggcctgccacaggccgcgcggtgggggcgccagggccatggccccgcggagtagcccctgtgtggccgtgttctgcgagaggctgcggaagagcaggtgctggcgtgtgggcgggcccaggggcagcgggcggcctgaagcgttcttggcccgcggcttgcatagcacctcgagcgctcgaggccaccgaggcggctctgagtagaagtggaaagtggccgtaaggatcatttccgagtcttgcatggaagtcaggttgaagaaatacacggccttctggtcgaccacttctgtgagggaaggagagaccacaggctgtgaagttctcgctcgtgctcctgagggtctcccacccagggctggaggagcaaacgcccaccgatccacactttcaggaccatcctcctcccccgctttgcttccctcctttcgtgtaatcctcacatgaaactgatgagggcgccctttgcaatcctcagtgcacaggtgaggaattaaggttgagattgtcaatatcccgtagcaaacaacaacaacaacaaaaagcaacagcaaagaaataggggcagacagggaggcattcgggcctgctggactccaaagctcctgtttgctccccctgccctctactgcctctgcatgcacaaatgaacaaatgtcactgacaccttcattaagtgctcaggatggcttgggttgggtccaagccctgcatcaaggcagcccctcctgtatttgcacagccctctatttatgcaatcagtttttaaatgcaatcattaaatacacttcacattaaacccaaacattcttccaaaagagacgaaataaataaacgctcatgctttttgagcacctcctaagggaaaccaggatcaaaagtacagccatttaggcatctgctctttgttctgcctgaggacttttaagattgttttaacaagaaaagagcagcatcaggattacacaaggcaacctgactaaatctccaaggtccaggtaaagaccgggacgtctcaaccattacatctgcaacttggttcaagaatgctccagctccggcttccctggggctgccggccactccttcctatttgcctggtggaagcaggcgttccccagggcaccagggcagcacagccatgtcagcagtcccaggaagctgccccaaccttggcagcagcatgagtattgtgtcaggtttgaatcgcctaaacattattatatatcagtgagcgttctcaaatggccaagtccgctctaggcttctgaggagtggggagtctttcctggtgcctccctaggatgccgcacactaacaggacaccagagaggccaggctggctttctcctttccactgcttcatttcctgacaacgaagtgtccttctgctggggaacgtctggagaggagcagggctcccaagcccgggaagtgtgtgtgggggacactgggctctctaggggcatgggtcagggccacacctctctgacccctgtacctacagcatctgcagggatttttttttttaacagaaatattccactttctcttctttgtttctgttgggaagaaggcataattcaactgggattgttcacatactcttaagggactatgagcgggaagaaacagagaagcacatctatggaaggcctgataaataaatgccagtaaaggctcaggtggcactgaagccattaccttatttaatcctcacaacaaacctgccaggacagtgtcacagcccctcaacatgctccacacataagcagcagcccagggtctcaatgcacacttgaacctggcttccccaagcatgtggccttgactgcataacaatgacttccacattttaatcagcactccaggggactctggccatcagggaagtttgggaagtcagtggcagctgatagctcactccggtggtagcggtggtgtatctgcagcatctggggttgaccgatggatggggtgaaagttcaccaataatgttgcacccccccatccccaagctagaaaatgccctaggaaccaagctcccaggactcagtggcgccacgccctgaaccttgctttccccatctgcctcacagggacaacagcctccatctcacacagaggattgtctggaagatcacagaaacagcctagtgaagtgccaggtacaaaggaggtgcccccaaatgtgctttctgcctcttgaatctaaaggaccaaggctggcagagcaagctcccctccatcaactggggtaccttgcattcactgatccaaatatctgagctgcaacccagccaacacagcacattgtttttctttgatccagttcaagtctcaactcctccattgttctgctaacagattcagagtggggaggaacctttgaggttgtgcaaaagggtataagtcctacctccatgtggcttgaatgcctcctgccagagggagctcagccctcactgggcagcctgctctgggaagaccctccctgctggggactgctggggacaagatgggtcacccccagccccagtgcatgagggaccacaggctggtcctctctctggatgtttctgcatgtacgcagtgcagggggctccaggctgtggctcagagaagggacctcaacctgaaatctttcagtttagccgagcccaagccataagagagaagcattgaagagaacgtcattatttcctctgatgcgtgctggtgctctgtgattcatgtcttttctctcttctttcttctctgccttcctccctcctctcttttcttcccctctttccccttttctatccaccctcttttcctttctttcttcctcttcttctctttgttttcctgataaagatttgcaaaactcctactccaggctaagttgggctgaccagggtcataacaaagttgcccaggaggagttcagcctagaggggagacagataacaaagttgcccaggaggagttcagcctagaggggagacagactggtaatggcaatgacacccgtcttcagtgtctcctcatgtcacagttttaaagagcactgtccaagcgaggcccccggtgtgctgggtgcattccatcacaggtcaccccccaagctcggagccctccattgccccaaataaaactcaaccccttaccaaggccttacttgatctggcctgcctacctctgcaactttatctcctatccacagcccaaccccacccctctgcccccgtcacactggcgttcttctccttccaacatgtggctttattctcaggactgtgcctcacgcttccttccaccttcatggttccccatccagtaccactcaacctcttcaggtatctgctcaaatggaacctcccacaatgggtcccctgggctcccgtggctggagaacagcctcatcactctgtctgcccctgcttcattggccttcagagcacttcctgacatcctgctgtatactgatttactgctcttatcttcctaaaacataaactctaacgggacagggacactgccagttttattcactactgcaccgctagacctcaccataaggcttaggtgacagttggagctcagagatgcatgttgaatgagattgtctgtgaaaatcctgcccaagtgggcacaagagaagtgtggtctgttacttcagttaacactgggggttcctggcatgcttccctagagtgcagtaaccacagccttaagaagtcaaggaatcctcattctttacaaagatgcagctgatgatgcaaatccaaatggagacagtgggcacccaggtgtttagccagacttccccttgagcctcagtgttctcatctttaaattggaagaaaattgtttattaattatgacattctgagctccaagtgtatgtgcttggtcctatgctgagtgttctgcatgcttgattcatcattttcaccatgaagagagtagggagcggtcattcattctgtggacaaagagctgaagcttcagagagggtgtgcaatttgcctaaagtcacacagttggcaaggggtggagtcggggcttgtacccagctctgtctgaccccaagcccatgccttttgctcctccatgtgttctggatatgttcatgatctgcctaagagctaatggacaaagatcatgtgctgtgaactgcagcacgttttgcaaacagaggtcattattttgatatttttgagttctgactccctaagaagagaaagactgactttatttagacaagctgatctcagtggctcttgggaattctcagaactgtgaccaggtccactttgctgggcactcagcctccttcctgagggcagtggggatggtactgggggaagggacttcctcatccaaaggcctgtccagccccactgctggtcaactctcaggccaagagcagccccttagatgctctgccctatataaaaagattccaagacggtttggagatctgtcccttcacccactgcccctcaaacagccactagggcaatcagtgagaacgctgggcttagatgcatgcaccaacagaagctggaggaaggggcggtgggccagacggtgctgcagagaagagcagggaactaacacagatttagtacttagtgcccgtttccatgcaggctctagggttgaggttcaacgcctgctggcatcccttactagctgtggggactcaggcaagtcatggagccactttgtgcctcagtttcctcattcataaactggatagagtatttgcacctccaaaagttattgtgagatcagctctgcagagcgcactagcagcactgtgcctggcacccagcaagggctcagaacagttatggcctcaggaactattgccaccctcagggcactacacccttgctccctgacctcctgcccagtgggaggcctcacttctcctccagcccttccagcaggagcctgagaactcttttgcctctcccattcctgcttttaaccaatctccaggccctgtttgctctgcttcctgtttctacacaaccatcctgaacacagcatctttccaccctgcgctcagggctccagactcaaccacaacagtggtcccagaactttgttccctcttacatcgcactcatgtctcaaaagcaaattctctattagaagtgaaaggttaagatccttactgtgtaaagaacctttgcatatcagtaggacaaaggagggactcccatacaaggaggcagtttccacaggaagaattgcaaatagccagcaggcatggggaaaagttcaagatgaccagtaatgaaaaaaagtaatttcaaatggaaatacctgcaagttttacctgcatgctgaaaatataatccataaaagatgtatccacatatatctcacatatatatctctcaaatatatccatatatccatatatatcttacatataagggtaaaacaatggagatatagatagtggagacatagatagatagatagatatggctggaatgattctaccaaaatatcatactaacaattccggttatatctggctatgtgattagggatgacttatgttctttactgtgatcttctataatttccaggttttccccaataagcatgcatttatttataatcactctctctcctttatccctctttttccctgcagtctctcctcttcctccctctctctccctctctcctttctctctctcccctctattcttctctctctccctccttccttccttctgtcccttacgcatgcacgttgtatattgccccattgcctatgggggaacaaattcataatactcatggctctccatggcctgcttgcaacctatttgtccgtctccatctcctgcctttctctccttgcgttatcattaaaaccaaactcctggcagtctctgaacacagtgaacagcttcacttccgcacctggctaaggcccacctgcccttcaaagtggctggggcctggcctgctctgggaaggctttcctggccccacccagaggctctgcccctgccaggtcagtgcgcctttgggctcccgcagcacccctgccctccttcttatatgccaccccccaggcctgctgccctattctgctgcttactttgatctgccctgctagtttatgagcttttctgggcatctttgtgctccctgagcttacagcatctgctaccaaacgaagtgcttagggaatacttggggaactgaaatcaacttgaattttggcatttttgacaggtgagtatgtagtattattttcaatttagagatgaagaaaaccaactcagtatcacattggtaggtgacaaagcttacatttaaacacacgtcattcagtgggaattaggggtggtctaaccttaacccttagggtcaggttcataggctttccccaccgatgcagatttaataaggaacgaaattcacttcagggagcaatgagggaaggaaggaaggggtggctggtatatcaacagcaagagctaatacaccattgacacttacctgtgtcaggaatggtgtaagcacttgacatatctcagtttccattaaaaaaaatcctataaggaggggagcactattagctccattttagaagtgaaaaaaactgagtcatggacaagttcagtcccttgcccagatcgcagaattgggatttggaccccacgaggccagctcacagccagcacttggcagctgagctgcactgcccggtggcgggggaggtatagttacgtatcgcaggctgtggggatggaggcatttgttgttcaggaagaggtgctgccccactgaggcagcagaaacccaccactggggagcaggctgagactggcatgttctcggaccagagctgaagcctcccacatgggtggcatcatccatgagagaagggtccctgcccaaactcatacctcctcagacaggtcactggatcaggaagtaggcacatctgagggcaggcaagaggcttggcatgaaacactcagatgaatcaagggaggagaggatcaagcaacctgcctgggcccccactgtatgcaaagcacaaaacctgcttagcccatttaatcctcacttcttcactgtactacaaggaaactgatgctcagagaggtaaactaacctgtgccactgcacacacctggtagctggtacagctgggattcacacccaaatgtgcctcaggcttccaaagaagagggatttgtcagacactccagactaccagaatcctgatttcccaggcttgtctgtttcaccctacccctcccagaccctggtcatagctctgagggagatgacagggtgtggggagtgacagtgagaacagcaatgacctggcagatgggagttgccaacccctgccactgtgaacaaccactgagtctcagtttccttatctttaaagtgggagtgctggatttgagatactgtcttcaggtcctttttgagattaataacctgaactccactgctacttgtactaccccctttctgtgaaaacagaatgacacaagaaggcatctccatgcctggctgcagcaagtagatgggctcagtgggcaggctcacccgtgtcgcagcagtgaccctgctggccttgcttcctcaactacaaggctttgaggattgagttaatagagaagcaaggtcaagtttaaacccacaggaatacacaatacttagcacgattatttgtgctcccaggggaatcccgtacatcaacacttaatctggccagtgctgggctctgagcttgcacatatgacctcatttcatcttcccttcaactgcacaggggagatattggcaagccttgcccattttatcgatgaatacactcaagtccacctagctttagtgatttacccaaggtcatgttcatgccagatgattcttaaatggtttaatttaataacgttcctcaagaaatggaccccacatggtgcaagaaagttatgagtgaggatggagttagatccaattggcctggagcccagggccactgacctggtgagtctgctaagtggaggaggagggcatggggcctctttgtggcaggtgctccccaatccatggttatgagaggccacagatgttaccttgagtcacacagccagtgacagatctgaccccaggctgtctagctccacagctaggcttgtttccctctccctcaggaggggagcctgtagactgcagatttttctcctgttgaatggcctcatcttctgcagagctgcaggagacccccacccacattttctggaacattattctgcaaccaggagtaatcaccatgacaaccagggtcttctcaccacccctgtggccctggctgcacctcctctctacccagggcctgcaaaggtgggcaggctgctgaggcaggagcctggaagtgctctcagaacagggcagcatgggcctttgcaagtgccctctgcccagctccatccaaggggctgaggaagtggaaaggtgggacagaggccggagataggcagagtgttcccactgcctaagcccctgggcctttccttaaacccctgtggtctgaacgcttcatgccagtccgtggaagtcctcaatcccgggcagccaaggcccttctcagtccactctgcttccctggacacaggaaccatagctgacgccagctaggggctcctgcttcctgacagggcccagtgcctggagcttctgcagggctgcctatgttcactggctgtgcccttctcatttgtaaaatgcccacataattgaccctatgacagggatactcccctggcctatgtcccctcttccactctctgtgcttacagccttgtgtatggggtagtctgtgtatgtccagcaatgtgggagcaccccaggggcaggacctctgtgccacctgctgccactcttggtgccccactggaggttcagggcctggcatggagagatcagtgaatcattagtgaaagaatgaatgaaccactcacccgttggctagaagaggaaaagtagaggtgcacgggtggggagacagaaaagtgaggaaggtggagaatgaggagaaggggtcctggggcaccctctacttacccagcctggccctgaagctgcggaccgtgttgccccctcccggccgcgcgccctgccggctgtacttctcatagagcctgtgcatgtggacagcgaccatgtcctgggcgctggggcccaacgtggcggccgcgtccccagggtgccgctggagatccctgtccccctgcaggccgtcggcggccgcgggcagtgcggaccaggcgggggccctgtggctgccggccacatcccggagcaacagcagaaacaacggcagcagcagcagcagcagctggggcccgggtcccgggctggtccgagcggggacatgagccatggcgtggtgagggcggcaaagggccgaagtccaggaggaggaaggcgagcgctggcgcaccggaggctgcggactgacctcgcggcagtagggcgcgcggggagagcccgggcagcagggcgctggataccgaggtccgcgcggggcgaggggcttagcggagcaggcacccgggcgcgcggtccgtgggtaccggcggcccgagcccccggccagcggtcacagccgtccggagcagcgcagagccgagccgagcccgagtcggcgcgctgccttggcggactcgcgccgcgaaagtttgtagcccactgcgcgcccggcccggctgcttcgaggggcggggcggggcggccggctgcgccctcgaggggacccggctgcgcgccccggacctctggggctgcagctgacagggtcgtccctggcccggctgccgtgtgcgtgcgcccgtgtgtggcagcgtgcgcgcgccggggtgtgcgcccgcgagtgtggggggcgtgggcgagcgcgctccccgctccccagccgagagcccgagacccagccccgcagccggctcctgtgtgtcggcgccgcagcctgccctggctgcgaggggggctgggcggcagttggaggggggcctgcctgctgggttgcccctgcaatggcatgcgatggctatgtgattgcaagatgacagctcccctgtgaggaccagagaggggatatgtgtgcgcccagttgcctcggagtcagcgtatgtccaaaatgtgagagtgtggggaacagagatcctctctgggctgactccgtaaagaaaagccctcaccccaaagctcatgccacccaagggaactggaacaagatcgtgattaaaactcagaattagctcattaaccagccctttatttgacgagagtaatttcagttgttgaagaaacacatcaaaggtccttattaatctttggacatgtggccttcaggattgcaggaataagacatgctttcaatttgcctttaaaaacatttccaaagcatcagagcaggaagagagaaagcagtggctttcctaagaaggattcccagtgaagtgagggtgtagtgagtccctggcccactgcccctcagcttaaccctggggcagaaggtcctgatctttgtcttgcctctagcaggatttcttctccattgatagaattcaagggctcttatgaacttgatggggaaaaaaatacatctttattttcattaactctaactgaaacttagcattaactaatgttataaatgcaagcaaccaaccacagtggtattagtgactttgtcaccaataggcaccatccacagatattttcatatcacatgagagtggttgcggattcatcaaagtatcatgtttgctcattaccacttcagttaggcctactgctagttagttagcaaaaaggaacatagttactatgttacaaaattgtttttaaatatttgtgataactctattctaacgtaattgtcttcctttgtaactctgcatattttattttatgcatttaaaaacattcttttaagaaggggtccactggcttccctagacttagaagggggcccaagacccacctaaaaagtttaaggacccttgagagggaaggaaaggaccacgtcaagcccatgttcttccagaaagctcccagatacagtctatgctacatttcaaaggactatttgcaaacttgtgaacaggctgttccctttacttggtaactttgggctctgtgagccaaaatagttacttttcttggagggctcacaatgcaataattgaaaaattgctggaaaaggcttctgttggtgtgtaaaacatgacccatttgtaattttttaaaatcttgcagtgtcaaattagaggccatcctattaagagcttctgaacctcagacttgtagcttttggaaaaccagagaaaagcattttatttgttttgaaaattagatcacagtgtgttcaacttcccattaggatagctcccatttgttctgaaccagttttcaaaaatggtttgcctggaagtgagatgatcgggtctcagcctgggacttagtgaatctctccttataaatgatccagaccatctttcagtggtcccttcccccactcccacccccatttccctccttctccatgtgcccctcacttcccctctgtccccctctccccttcccccccagaatgcctctgacctgcaccggctgggggtaacctctgctcatgggtagttttgtgtctgttggggccatacacaatcgaggcctgttgaaaaggagggtgagtccgcaggaggcccgcacaagctgggctatttggaatccgtgtccattaaagccttctggctctccttaactcattcccgctccattcaagccagcctgagggtcaggctttagccagcactaaaacctgtagggtacagattctctgacattgttgggaaagaattaaggcatcagccagggatggctaatatttcttgcctcattttattgctgaacagcgggactgtaaagccttgaacacgagcactgtggccccctttcatgtagccgagatgatgggataaaaatgtgtttggtgaagcaattcagattaccactgggtcacatcctcgctggctctcagcacggcccttgaaacagcatcactatgacaagaaacaatctctgtgcaatttcagctcatgcagaacagtttttctagtgtggaaatgaggctaattgtggagcttgcccacgagaatgttttgtttttaatagctcaggccgcagctcagaataagagttgagatggcagattgtggagacaagtccttggatctgtgatttctgacagcttcctacaaaattatcatggttctgggagttccgtacactgcaattgccaggggtgctgaggtcttgaacttgctgattggagtgaacagtgttctctccagacaggtgagaagtagtttgggggccctcagtcctctaggcctccttgctgtgcactctgggatagcagggttttcttcagctcagaaagtcatgagcaaggagtgaagagactccatagttatgaagctctgcacccaagtaaggaagtaaaacaaaccctgggtagttttgaaaagcaagctcatttggtttcatcaagaacctctccccaaataaatgttcccaagcgattgtttcatgatatcgtccagttaatttgtagcagagctagtgtgtgattttaactagctctgtaaccctggggcagccccattgcctctctggaatcctaggagcctcttctttaagtgagaagtctggcctccaggctctgctgtagctcctgtactctcccgctggttctgtggccccatgtcaacatgttcttggaagtgagggtgctcccatgaccctgtggagtcaattgggactagattcatgtccctattttcactgctacttagctgtgtgatgttaagcaagttacttgccttctctggacctcagttttttcaactctaagatggggacaagagcaggatagtatgaggattcttggccagattttaaagtgacatgatactaactaaattgcactgatcattcagattggtcttttcatttattgtgtgtttgaaagaagttgtagcacatttaaagtagacccagactggcagatttggtgagagtttcaagcctggctgttccttactctgcagagaaaattcgtttcttagtgcacagtgccaacaactaaaaaaaaaaaaaaaaaaaggaaagagaaaaggaatgtttccttgatgaggaagtcacagacctctaccaaggaactgttatgctgttattgtctgtgtctgcgggttcttgtccaaagattgggaggaagattcacagctcttcatctagattttcaaagctcctggcccttaaggacaaaagaaatgcaagtgagtccctattccggttggggcatgagctgtggggtgctagagacaggaaccccagggcctccccaggccgcggggccagagtgtaataaatctgtgaaataacaagcacaaaggactttataatcaatgacagattttatttttgctctggcaaaatccatctgtggagttaacattttacagggaaataactacccactttgtgactcctcctcagcccatattctctttcttaaagttgggaaaagctcagaaaatcaaagtcggctcctctgagaaccgtggcaagcgaaagcatgacttcccctgggcggggacccaactctcccgttacttcctagggtggtgggggccattcatttctgttttgctaaaatacccgtgacatgtgaataaactaggattacagaacattgtctcggtcagtaatctgagccggcatggcctctggtttgatgaaatatggtgctctctgagcaaacatgggaattggtattacttctctttaaagctgaacagtggggctatttagaactgatgcatgaatgcagcactgtggggagtgacaatttgaagggaaccgatttgggggaggagggcagtggtgtgtgtgtgtgtgtatgtgtgtgtgtgtgtgtgtgtgtgtgtgtgtgagagagagagagagagagggagagagagttggccggagccagccagttaagaggagtctatgggagaggtggccaaggggacactttgaaaattaggacccctttgtggcttcgcagtctccttatcacccccaaataatcttgctcaaaacctttgactactctccttcacaggatggataaagccttctgtccttgtcctggcatttaagccctaaccatctggcctctctgtcctggtggagtctttctccagcctctgttcctatgcgtcctctcctgtcccagaatttagagcagcttcattccttgggttctcatcccaggcccctccccatggctttaaggtggctgtagctaattcccctgttgccagcacccagacattcatggcctcagctgccaggacttctgtctgctgagggctcacagtggagcccttcctcaggaaggccgacaggagcggcctcactcaagttatctcacactccgggggcagccaaagccagtgactaggtgcaggggcctggaaaacactgtagggccacctggctccgaggctgtctataccactgtgtcatttagcttctctctctggttatcctagtccctcagctcccttattggtgtggtccccctagcactctcccatatacttatgcactcaaatttcgatctcagagtccctaccctgagatatccaacctgagataattcatgccaggagtgatctaaggaagtgggctctaaggtggcatctgaggccctcatcatctgacattcagtggcaacgaggactctggctgctgtaactggagtccccatagcctgatgctgtggtggtgagttggaggggtcactttcttaggggttagagaggttcaggggaaggaataattctgaagacagtgggattgtcaagtgccatggatgcattagaaatagacaataaaagattgagaaggatgaaacactaattgaaggcagagtgtgagaattggaggatcatggcaccatataaagaaaccctcagttgttacagccagtcctgctgaggactgggcccaggacttacatattaagatagcagagctccagaaatggtttgattcttaaccccagcacttctgttatgccaaagtcaggggtggggccctgagacttggagtgggggcatcttgatggatgtactcaagagtcttaaaaccttacacttccttgaacactttggacctggggaggtgggctctgcctaccttgcttgaagatgataaagatgtagtgtgcgcccctctcataatctaccctttcctgtcccctggctgccagatgaaacctgggcttatgtcaccacttcgcccagccagggaagtctcggtgagaggtgaggccagctggacttcctgggtcaaggggggacttggggcactttcctgtcttacaaaaggattgtaaaacgcaccaatcaggaactttcctgtcttacaagaggtttgtaaaatgcactaatcagcgctctgtaaaatgcactaatcagcgctctgtaaaacacaccaatcagcaggatcctaagagtaggcagtcgcagggaggattgaaaaaagggcattctgacaggacagaaatggaacatgggaggggaccaataagggaataaaagctggccaccccagccagcagcggcactcgggtcctcttccatgctgtggaagttttgtccttttgctcttcacaataaaccttgctactactcactctttgggtctgtgccatctttaagagctgtaacactcactgtgaaggtccgcggcttcattcctaagtcagtcagatcagaaacccagtggcgggaaccaactccggacacaccgggcccaccaaggggaagaatatggtagactggaggatctgcagagtcaacgtgtataagcaagacctgagggagtatgattgggatgggtcccaagggtgctgaatcaagggagactggatttggaagtggataagggagagtttgtcagtctaagagcacggtcccatgatgccggttttccaccatggcaagtgccttagggtacggggctgatatgcttatgggttggccgttggacacttggaaaaagcaatggtctgcagtaagtgatgtgtcaacgctgaaatagctgtggtaagtgatagaagaatggactaaaggctcagagagcagacatgctggattagaaatggtacgcaggctggaaagccaccagcctatatgttccatggaaggactcagaggactctccatttaccaaagtgataaggaatccactggtaagagggataccagcaacatgcaaagctgagggatggcttctatctgtaggctggggctgagggtagagggtattgttactgatctgggctccctagcagaaatgaggatgaaaggatcccaaaataatggagtattttgctgtgcaaatcaaagtagatgcaattatcaaaatgagaggtgcagtcagatttcagtcagggttcccaactcatggggagctatgaagacatttaatcaaacctgcagtcgctgggggtaatactgatggacagcccacaagagcaccattcaatttgtacaaactaagacaaatcaaagatggataaatgaggctgaggacaaccactccaaaaaaggtcacacttctttgatgggcttgagccagtttctatacatgaacactttgagtgagggagaggctgggacctcaggaggaaggcgcctgcaacaccacagcaaggatagatggtggtgatttccaatccttccccaaagggacctatcaccatttactcaggcaaccactgaacctgagggaagggaaacatccagacacttcaagaataaatggacacatggtccaggttgatattgatacgaaggacccaaggcctcattacaactcccctgctagagtggattttgtggaaaccagatgatcaatgaatcctggtgcagcccagctcgctgggcttgcggactcatccacagcgatttccttacacctcaaatatagaattgcaacaaacatccttggtagctgccagaactttgcattggttccttggcttacagggcaagagttagaggagtggggaaggcaagttgaaacttgtggggtaagagttaccatagtagagaagtccaaggagaagtgtctgaaaccattccctcatccctgtcctggccagattaataaatcaaaatcagtgtcgtgtcccaagggaaatggtagcgattagtgccatccttaaaaacctaaaggatgcagctgttatggttacacactgtcctcatttaattcaccagtatgtcccctacagaaaaccagacgtatgctagagaatgactgcaaattcaccaagtgatgtgtgagtagcccttacctcagcatctgtgccagatgtgggatcttggcagagcagattgacatggcctcaggaatctggtatgccacctctgatctggtggatgtattctttttcatcccattcaagaacacagaagcagttttcattcccatggggcaggtcccagtatgcatttactagtatgtgtatttcttgtcctagggccatgttaactgtaccacctctgttatgagggatcaaatggatatggatcatttggatattccactgagcataacattggtcctctgtattaatgacattgtgttaaccagaatgaataagtaagaagtggaatcagtaatcagtaagaatactttagagaacttggtaagatgcctgtgctccagagggtgggagatgaaccccatgaacctcatcactgagactatgaggtagtgtgttagtccatttgtgttgctataaggaatacctgagactgcgtaatttataaagaaaagaggtttatttggcttatggttcttcaggctgtacaagaagcatggccctagcatctgctcctggtgagggcctcagggagcttccactcatggtggaaggtgaagggggagcagggatcacatggtgaggggggtacatgaaagagagagggaggaggtgccagatccttttaaacaacgaggtctcatgtgaacccacagagtgagaacaaactcattattgcgaggacagcaccaagctattcatgagagatctgcccccatgacccaaacgcctcccactaggcccacctccaacattggaggtcacatttcaacatgagatttggaggagacaaaacatccaaacatagaggtttggcctgagcaacttggaacattccctccaaaatagaaaacacattgtatcttgcacttcccatctctaagaataaacaattcctggcacttttttgggctctggagatgacaagttccatcgttgtgaatgctactctgacccagagggacacaggaggatgccagctgtgagtggacccagagcaggaaagaaatctgcaacctgtctaggctgtgagcaagcagcccagctgcttggatcataggagctgtcagacctgtggtattacaggtatctgtggaagacagatatcatgtgggatttgtggcaaggttcaataggagcgagtccaagccatctgcagcagagaattatatgccctttgaaaagcacctcctgatactgggcttcattcgagatgaagagcttaatcatgcaccatcaggtgatcatgcagccagaactgcctgtcatgagctgtgttcttgtagatccaccatgtctacatggtccataagcttgggtgggcccagcagtaactcatcaaagatggaagtggtccatctgggatgcacatgagcagtgttgggggtgcagtgaggctgcactagtaggtggctcatacctccaggccatctaccactgtgcacctgtgcttctctttcatttcatacctgtgaccacgtgggggtcccttatgataaggtgatggagaaggaaaatgtatgagtttggcgcagggagaagtagacttggtatatgggtataaagtaaaaatggacttttgttgcactgtatcctaactcagggatgaccctgaaagacagcagcaatgaagggaaatcctccttatgggcagagctttgggggtacagttggtcatccaccttatatggaaagaaaagtgacctgagggattttggggcagtgggaaatggcttgattagttgatttggggactggaagaaaacatctgaaatgtcagggctacggaggcctgtggacaaggcatatgaataggcctacaggagtcggcagggagtgagaggatctttatattgcatgtcagcgtccaccagagagtacccactgtggaagaaacactagacagccaaggatatagactggctctgtcagttgacatcagcagcctctgccatcagtcagaatgagtgcctgcctggagctgctgtggcaggaatgggagctgtggatagcatggcagcatgagtgccaactgaccagggccaatctagctctgccacttcccagtgtgcagccaaccagcaagggagaccaatgccaagcctgtgatatggcctgcccctggctgagcacacgagttacctggtggaaggatgattaactggattctttccaccctggaaagagcagtgattcgtctggtctggagtctacacatattctgggtttggtttgctgtttttgcctgcagagcctcagtcagcaccacaaaacttagaaagcatttgatatcctccttcaggatcctgtgtgacagagcatggaaccaaaggactcacctcgcagcaaaggaggcaccacagtgaacacaggccaatgggatataccagttctggcgcatctccgtggtagagcattggaaagtgcggctgaagcaccatctggagaggatgctctgagagggtgggaggccatcctccacaacacaatactcaccccaaaccaatggtcaatatgtgttgctgtgtctcagtcagtagaaatcatgggtccaggaaccaaggcacagaaataggagtggcattgctcatcgtcacacttagtggcccaccaggggaatctgtgctgcctgaatgctcggcacagtgggtctaaaggtcctggtgcccagaggaggaatgcttcctccaggggacatggcaagattcccttttcatgttcagtgacaggtgctgccaaccaccaccagctcctacgtctagagactggtgggaaggaggggagtctccatcctgcacaggtcatcaaacctgtgctgtcacacactgggacagggaggatgtctttagcatccaggtgacctactgggtcatttcctggtgcctccctgcccaattctgatgacaaatggacaagggaaggagccacagcttgagaagggcatgacaactctctggggcgtgagtctgcgccacccaccaggtgagcccctagagaagcagaggcactagccaaggtggaagagaacctggaatgggtggcagaggagggaattggtgagtacccatggtcctgagcccagctgcagcacaggtactgtgatcacccctttaaccttcttcctcttgtaagctttcccaggaaaagagaccagggagcatcctgggggagctgttcccaggtaggaccggattatacaaaacaagtggatgcagctgtggagagggaagcctgtagaggacactgtggagctgcccagctctacccttcagggttgaggcccccatttcccagctttcaggggtggtgcctgctgatggctcctggctgaaaccctccccaggaattgccctttgcagcctaaaggagctgcccagcccgtggccatgcctgctcttccccagggccgctgcatctcccagctgggaccacacggctgtacaaaaaagtctgggctccctagtctcaatttgggacaacactgagggaccatcccaactccagagctacctgtgggaacagccacagcccccgttgtaatcgcattccagtcaacttccccctctgtccagcagcctctctcaccccttccgggtggtgacgttcctaggttctggcctcataaacccgccacactcattttgccacccctgagcctggttctggggtgctgcacatgagatggcaggacccaggcacctagagtggccatgtgtcccaacatgacaactgcttacttccttattccctttccacctttctgaaaaatatcattcttcttctggtatttctctaacatctctctcacacttcctgattccccttgttcacaggaaaagcagctggcaggttcataagaaattcataagcccatgtttcttttatttatttttatggttaacttctatttataacaaggaatgctggttttccatttatacttgagatttaaagattctgtttaaaataaatttaagtaaaacggagtgagtgggttttttaaaaaacagctaagtaaatgataacgatggcaggcatggtgaaggtggttcactgaaggatggcgacttgggcaatgcctacaccagcaatttctcctgcctgggagcccctctgactcaggtgaataagcgtcctgcaaaaaccagccccaagactccattctttgcaaaggtcctggcccctgcgtttcagagatagtcatgtcttcctgtaagatacgtcccactgtgtggaacaatctttctccacgtctcatctgcatcaggccagcaagggccttgagcgctaagtctttcttactccctgttgttgctccaggacccagtgtgggctgagacacagggaggtttgggggcaggattttaaagtggtccccagaattctgctcctggtgcatttgcccatagcaattccatcctgagttggggtggggcctttgaatatgacgcatgtcactcctgggattcacttgtgttatatggcagaggtcatgcgattttgtgtgtatctaattgaaggccccaaaccgctgattttgatggaatgaaaagggagattatcctgggtgggcctgccttaatccggtgacagcccttgaatggtggcctgggccctttatgaagagagggctcccatgctggccatgtcctgacgaagggtcctgtcataggcctctaggagctggagccatccctgatgacagcccagaggaaagtggggccctcatactacagctgctaggggcttgggagagggaggacttgggctccggaaaggtctgcagcctggagaatatctggatggcagccatgtgggaacctgactggagagcccagccaagctgtgaccagactccgggctcgtggaagttgtgagataacacatgtgtgctgttttaagctgctaaacttgtggacgtgtattatgcagcgttaggaaactggcacggcagcctgcagacattggccgagcgagtatgaaagcctgcagggcaccccgcccactggctcctgagatttacaggcgctttccacctggggagatgaggctgccagtgcagggaagggttggcagctgctgcagccctcgagttgccccttacctcacatggtgcagacaatgaacagaccggggactgcccaaggtcacttagagtggagcacgtctgggaacccctctgagcctggcctcctcagccatgcttttggtgccagccagcgcagtgcccactccatgacctggaaggcatcacaatctcctctttctttggtgacttcagctatcagtggatctccccaccctgccgcctccccatggggtctgagtggcaggtggaatgtaccctccctcttctcacccaccctctggctctgggacatagcagctctcccctctgccccaggcagcccttcatcctggagctctgccttgggcactctgatggcctggccccttgccccagtctcctctaccctaccctccaccctgctactccacccttcgctagctgttttgtctgcctgcatggcttcctgccttctttttgaaacagctctctcctttctgtggaagaaggcttcccccaaaccacacatgaggctcagtggagctgcctgtctgagaggctgcctaagtgccatgccagggggttggtgtatgccagtcctaacacttcccccagccacagtgaatcccaggagaaatcctaagttgggttagtcattgttccacaggattcttctaagcagacttggtggtgacagccccgctcttcagtttgctgaggtggaatgtcaggtggccagaccgggctggtgctgccaaggtccctgtaacacagagacacctgtgtctaactgaagggaactgaggcagcagaggagaggataaagaggtggagaagcaggaagaagagaaggaggaggaggagggaggggaaagagaaacaggaagaggaggagaaacaggaaaaaaaaaggggaaggaagaggaggaggagagatgaagatgagagaagagggaaggtgttttagttacaaattatccccaaacttattatggctcaaaacaatacacaggttctatctcacagcttctgtaggtcagtggttcagctgtggttgagctcagggtctttctcaaggctgcagtcaaggtgcaggctgaaatctcccttatcttgcaccggcttcaaagccctcgaggctatgggcagggttcagttctggactcttgggctgacagctccatttcttgctaagttctgagctcaggattctctgcttattctgggccttctctttcagaacgtctccatccacttcccaatccggcatctccactcagacctcaggctggcattccccagtggctctgggataccaagcttgcttccagggatcttctgcttctccttctgcacctgctcccctactgtgatggtgccatggagctgaaggttcatggctggctcctccctcttttcccctcatccccagccggctgccagtcctgtgaagctcatctcttggagccccctctgcctgctctgcacacggacactttctcatccaggtcttgatgctctcttgctgctggtcgctatgccaggcccactgccttcaggctccttcctcaaggctacagggcaatcttccttatgacagacgtgcccctgccaccctcctgcttgtgggacctcacctgtctcctttccgtggcatgatgcctgtgtcagacaccaacacatggtccctgcccctccttcacacctctcttccaggcccctgcgtgtcttctcatttcctgcccacatactccttcctcccaaggacaggcctcctcagccgttctctcagcctgacatgtcatcccccagacccacccttgattttctccacctgcaagagtcccaggatcaagtttgtctccctcaggagccctctcagaagcccccctgcctccacagccctttccttccccttaggaatgggacttgctccagacagccctgtgcagagctgtcctgcaggtggctgtcttctgccccaggctcatggggggacagtggctgatgagagtctgtcccatggaaggtgtctggagagttagggaatttgctccaggaccatgggaggggaggaaggggaccatgacacatgggggtgatgccctcgatggcatgaagcccctccactgccttctttcctctggcctcccttctgagccccgatcatgagtcaggagggtagaaaagttcacagccggaaactctcagctctgagcagttgtcagtttcctatgattctagcaggatttgctactcctccatgatttactcagacatcatggacgatagaagccaaagctaaactgaacaagcgagaatgaaggattaattggctgagataacgaaactgcctagaggaagggatgagctagccttctggaaaactcaaagtagggacttccacattgtcagcctccctccctgccctccctccccttccctcccttcccttccttccttcccttcctccctcccgcccccttccctcctcctccttcctccctcccacccccttccctcctcctccttcctccctcccgcccccttccctcctcctccttcctccctcccgcccccttccctcctcctccttccttcctccctcctcctccttcttcctccctcctcctccttcttcctccctcccttcctcctcttccctctctccctcccttccttcttttcttctcccctttctccctcttcagaatgaaaacagctttggtgttaatggacaatgtaattactgcttggctactgtaaagtgagagtgatgtgtaaggtaggcctatcaacattctgacagccatgcggacccacaggcagcgaatgtttgctctaggggccggacagtcaatattacaggctctgtgggccatatggttttaactctgcctgtgaatgcaaccatagacaaaatgtcaatgcatgggcatggctgtgtgccaataaaactttatatacaaaaatgatgggctgggtgcggtggctcacgcctgtaatcccaccactttgggaagccgaggtgggtggatcacgaggttaggagttcaagaccagcctggccaagatggtgaaaccccgtctctactaaaaatacaaaaaattagccaggcatggtggcgggcgcctgtaatcccagctactcggtaggctgaggcagacagttgcttgaacccgggaggtagaggttgcagtgagccaagatcgcaccactgtactccagccttggtgacagaccaagactctgtccgcccccctgccccccacccaaccaaaaaaaaaagatgatggcctggatttggcctgtgggctgtagtttgccaactactgccataaacattttcttctggcctcaggcatcagcatcattctctcctatgacagaatagtggagggggtgaatgtatggaggtcatgagtccagcatctctgggccctctccaccatggtttatgaccaaggaggaaaggcatgactccctgccagcccagcctggggatgccagaggtggactgattgacctggcatgaggcaggtgctcaagtctggatcaattgtggagggaagtgtgtggctcttggtggtggagggatgtgctatttgatgaagggtgagctgtttgggacatgcaaaatgatgaatgtccagtacattttatatcccttgagcagagctcagcttttatgaaaccagtcttactaattactatggcatgatttcttaaaaagtagattgttttcacttactctgtcccatcatttattgtttacacagaagttcagtgcatttcctgactccttcccacctctgtgaatgcgctccaggctatagagtatctcccaacagatattcttcagtccagaggactcacagtattggcctcctgggatttacttggtttcttgctgacatttcccctgtccccatggcccttttccacaccccacctcctacctccagtaggtcagactctgggaggcactggcagactcacatccagctggataccatcatagctaaagcagtgctgtgatctttgtgcttctgcctctgtgggtagagccctgatcccctcctgtggacccaacccgctcagtgcaggtggacccagcaagcagagctgtggattcaggctggtggctgatcccctcacaccttggagaccttggggttcctgctcgttgcctcaggactgcctccttcctggctgttggggctgctgtgcccagctcacctctggggtcagcctctctggggccggcttcttgctgcaggtacaagactttggcattctcctctgctgaaaaatgcagataatgatgaacgttcctcggggtgctgtgaagagcaaaaggattgcggaaagcacatgcagctctcggctcatcgccgggctagggtgaccatcttcatctaccctgaatcctcccagttttagcaatgaacatccagcatttcaggaaaccctcagtcctgggctaaggaaagctacagtaagtgccactggggctggcattgctggtttcttccagtcccaccgtggcctgcacagggacgatgtcctcccacacctccatttccagcatggagacgattcaaggccatcatgtgaacagctcctcggcctgctgggtgaagaactgagagatcaatcccacactctggcctccacctatgtgtgcctcagccttggttccttccctctcaggccatcctaggagaagccaggtcctcttgggggtggtgggggtgcggggaggtttgtggcagtgccctgctgcccaccaaagctgactcacgactcctccaagctcatgctgctgctcactcagggttgtgggactgccagcctccagccacccctctgctcccttccacctcctgctgtgtcaactgggccctgtacacatgcatatgataaccccctgcctggccaagctctgtccacacccctccaccctcctgcgatgccaggtgctgcctcctgggactccctctcttcatgataatatgcactgatgcccttctctgacatttagctgttttcagggaggagtaaactgcatggtgggctggacatggtgagcacagggtgaaacagactgcgaaggaaactagatggctaggcttcaggtcggcgccttccatggacatgggagttgttgggagggcagtcagcaggaagggggctgcattgggaggggcttggaagatgggctggggagatccccaggagggaggtagtgaggggctgccacctaggtcttctgcttcctgtgaaggacttgtgggggagacctcctctcctcctgtgtccacagtgcccgtgtcagactgcagctgccactggctccataggacaggaacccctgagcttctgcactgttcctgctgtcagggccaacctgacagagttaaagccaattccctccaaagccagctagactcggggtagattcttctaatgccactttgcccagtgatgcccttgcttcaggttcaaattaaccaaatgaacatattgcatgagatggtttcagccctatacgaagtagttggaattctattagatttcccctgattttcttccttgtgagcatttgttgttagctagtctagcactctagtgtttattacatatttctacttcaggtaaaattcatcaaacagagtgcttctcaatatgcattcctctgtggggcttgctatttccttctgcccattttggtgcacagtacagcttttggtgtctgtccctgctttcaggggtgccgtctgtgaccagcgaccccaagaaagccacacccatggtgctatattagcacctgcacccccacatcagagccatcagacagaaataccaactcgcagggtactgaaaaaatgctttcttattataaatgtacatacaactcattgaacaatatatggaacatctccaaagcacagatagaaagaattctctatttttgtaccacccaaacttaccattaccaggtggttcaagtctcttccatcctttctctgtgaatctcttatttttcatacagttgatccatttgtagtcaacagatgtggattttctttttgtcactaagtgttagaacataagcatttgtttaatatcacaaacaaactttcaaaaacatacgccatagagtgtggaataataggtattagagacttggaagggtgggaaagtgggaggggtgagaaattacataaagggtatagtatacactatttgggtgatggttatagtaaaagccccgactatgcaatttatccatgtaacaaaactggatttgtaccttctaaatctgtattaaaacatattttaggcagggcacggtggctcacgctgtaatcccagcactttgggaggctgaggcgggtggatcacgaagtcaggagattgagaccatcctggctaacacggtgaaactccatctccactaaaagtacaaaaacttagccgggcgtggtggcgggcacctgtggtcccagctactcaggaggctgaggcaggagaattttgtgaacctgggaggtggagcttgcagtgagccgagatcatgccactacactccagcctgggcgacagagcaagactccgtttaaaaaaaaaaaaaaaaaaacccaaaaaacaaacaaataaaaaacacatattttaactgactgtatatttctttcttttttttttttttttttttttttgagacagagtcttgctctgttgcccaggctggagtgcagtggtgcaatctcagttcactgcaaacctccacctcctgggttcaaggaatgctcgtgcttcagcctcccaatttgctgggactacagaggtgtgcaccaccactcccgctaacttttttttttatttttaatttttagtagagacaaagtttcaccatgttggccaacctggtctcaaactcctagcctcaagtgatctgcccgtctcagcctcccaaagtgctggcactacaggcatgagccactacgttcagccaattgactgtgtatttcattggttagctttgccatggttcagttaaccaatcttcccttgctgtttattccagtttttccatattataaacaataacaaaaagaacatttttgtgcctaaataccttttttttccatatttataattattttggctttggcaaataatttgctaaatactaccaaagaacagatttgcagaagtgaaattatttgctcaaagaatacaaatatttgcagagcttttgtatatatttaaaactgctatccccaaaatagtgatattactaagcttattttttatgtatcaaattttacacttttacaaaagcaagtctaattcttcttcatgtcattgataattctaagccttgtgacatctctcttcctagattaaatattcagttatagtttcttcctgcatcgcttatgttactgcatgtaattgttattattgtttgttgttacagctacctgtttggtctgggtgggatttcttttggcccaccctgtgaggcacatgggctcgaatggctggcttatgactcatctggggcatgaaaattaagaataacctgggctcctcagccatgctcctgctctgaacccatcagcttctatgcattctttctgatggctggaagggcttctctttggggtgtttggggtgttaggaagtgtgagatgctgtgaggctccacggaatgggtggacgggtggcctctacatggtgtggcagaggaagcctccccccaggtggccctgctgtcatctctgcgccccagaaccctggcctaaccccaggactccacaaggcctgctgagcagccaggctgttcccccatcttgagtagccactctgtcaggtcatgcctggcgggaatgatgaactttgtgtcaactgctgattacagaaggctggggcaggtgctggaatgcctcttgggtgaagctagggaggtgctggccctgcctccccaagccaggctcacaggccttttggagtcctgattttggactcccacagcaccccgtgggacctggagatttttttctcttcaacatccatgtgaagatgcttcctgaggaacttccatgagctcagcactagggcaggtagttctggggatgcagaaaataagagcaggggtgtccaaagctggttggggggtggtagcttctggggactgagagtaaggtcagggcacaaggtgaggacagaggggcaggtgggaaatggcagcgatggcagcgctctcactgggggaccctagctgggcctgagtggagaggcccaaaaggcttcctggaggtggtgactgagctgggaaggaagcagcacaggcaaagaaggacaggctttgcaggcagggctcaaagagatggaagaagagaggggagcagccatgagcttcccaggaactgcaagtgtctgggtgaagtgggagttcaggatacccctggacttggaggccttcagacaatcacagacagcaggaccatggcagcagaaccctgggagagaaggaagaggcagtggtttctgctggctgctggagcagagtggtcttgcaggcagctcagaggcccagggactgtcatgggcagaggcatagggatcggtccttgctgaggctgggcactgaacaaggtggtgcatgagacaaagcttggagtccggtcatcatccccctcctcaagctgccaccctagctggagctggattcaggaaacgacagccctttttcctcatgggggaggtacctggctttggacagacctgaaggaggttctctccagacctggaggaggtccatggaaggcagcaggcagggaaagtggctgtcctgactagacagcaaggggtggaggaggagctggctgtggctgcatgaccttgaatgacctttgactccacaagcatagtgtctgtgtaacatgtgccttgacagttcatcttgaggtttaaacatcattctttaaatcaccctccatgatgccaggtatcctacccctcagaatgagagggcaactggctggtgttttttaagcggaccacccgcagcctcactgagacacctcttatttccaggagccaggtgtccaggtccccgtgcagctgtggtgccatcgtgtcctggatcctcgccaccttgggggcccgtcagcgcctctctggagcctacagaggcacctggcaggctggcaggcagcttttatatgcctagttagggttttatggtgcagccgggaggatctgcgtctgacaaggcgtgcatgtgactgcggcgtctgtgttcctggccgggcctgcctgagagcagagaccggcggggtcaccctggggaccgggcgccgaagctcagccacagaacaggggtccaggccatactggctaagccttgcccctcctgagatactcatttccatttgttcatgaaagggccaggctgagccaggcccagggggtggaggaagtggggcagggaggcctcctggcctgggggagctctgggagtgcccctccaatccccccagggccagctccaggtcctggaaactcagaggacaagctgcaggaccggccacccccctacccctctctctgtgcaatttgtattccagtgggcaaggtgacaataaacctataagtagacaaagtagtcacaggatcgtttctggcagggtggctctaggaaagacaggatgcagggccaactgggaggatgtgacagtggctggtggttgggctcacctggggaggaaaggcctgctgagacatgaggaagcttagtcaccaaccatcaaagggcaggcaaggggaccacttagcagtgagtttggggtgctcatggtgcaggctgcagaccagagccagggagaggcaggaggtggcagggccaggccttggtactctcgtctttggtgaggaatctgcatttctctttgattggcactgttgcacttgcagggctcacagtcatgtgagtcaggtaatcattaggggaggtggggacacagtcggctgcacacagcctagagagatcagctctgcctgggcactcatggacagggagtgcctgggaccatccccactcatacctagtgacctttgtcattctcagaagtgccctgatctggattattaattatgtggtcagcttcacgatgggcaccctcacagagggagagatagtcctgcctcctggaagcagaggatgttcaccaggcaggcagcagggaagaggattccaagtcctggaattaggaaatgcataaatgtgttgggaattgctgaaagctcggtagggataactcctggactgtcaggggagggatgccaaagaggcaggagtggggcttgagaagactccgtggagtttggactcagtcttatagccttgggttgttgagagtcacaagagagttcaaagtctgagaggaacacagtcaggcttatgtttagagagaactcggtgaggactcaggcaggggaaccagggaagcaaggagccgaggcaggggttgaggaaggaggctgtcatagtgtcccaggcaggaagtgtcagggacctgacctatagcaggatcatggggttgtagagaaggatggatatggaaaactaatgaggcgggctcagcgaggaggagcagatgtgggaggggcatcctggatggggcccaggtagggcataggactctgggtggaagccatggaaagctggagaacccaaggcgaggacagcagagcttatcttgtgcagtcagagggtggcagggatggttgacgctctcctgccaagtgtctgtacccttcttctgtatttcccggccttccttgcagttggtggaggccacgtggctagctcttgccaatgagaatgtgagcaaaagtcaagtatcacttcctgtccaaggcagtgtgtagggggtgaggtcctccacatttcccacctcgtgagctctctaagatggcagaagaacaaagtggacgctactggatccctgacttcccatttgaggaaggctgtctgacttacatagtgagcctgcaaagacagtgaagctgctgaggcttggggacttgccactactgttcatgagggtcctgtatcctgattgctcacatgaagggcagtggggcaggaggaggtgacaaggcacaagggaaagctcatccagagagaggaagaggctggttgctgtcctcactgcctgtcccagattcaccattcagggagccctcctgctccctggggagactgaggagacacggggctacagctgctctttccaatgcatttgcaaggatgagagctcttgggtgttcatttcatctctgaaccccttatggtttagcctgtggtcaaccgaggcaaggccatcctggaggaagagtcagcagccagaggactgtccagctgctgccatgaggccactgctccccaggatcaaccactgcccctttattcatgcacctagcatccctggcgagcaatttagcttctccccatggaagactctaaaatgaatcagaagggaacagtacaacctaatcccaaggctctaccaaactctggacttttaattatagcaccattctgggacccattgaatttagaaaacagaggcaaatcctcagctactagggcagttaatccaggcaaagcaatgctctcagctttttgtatttagtgaaagccacattgaggttactgttgtcaaaatctaaagcagagatccagtgacagctgagggaaagaaagtaaatgatgtttattgggtctgttcggcaaaacttccctcctattcttttgttgttgtttttcctttcctagtatctttctgtagatttttgtcctgggaaatcccacttaaataaagatgtggagtttagtaagttccagtcttctggggtgcatccattgtccacatttatcttatccagtgctattctcccaagtcaaatcttcccctgcaaaaggtaatttccatcttagcaacgtttaagcaggcctggactccatctgtcgctgtcccacctggctatgctttgggaatcttgtctcctctctgaccatccttaacatcccagtttgaaacatttcttcttgggcttttccctcaaggcatggatcaccattacactctggaactagcctagcttccagaatgcctactgagaagttcaatgtcctttatttctatttatttctgtgtaacctttcttctccagttttgccctctggaagttttaggatcttcttttgattccctgtgttctcaatcttcatgctgatgcaccctcatggatgtttctgctatacattgtgctggccactgtgtagactctttctgtgtagaaacacatgtccttccaatctaagaaattttctaattattcccttaggtttcttacacttgtcccccgtttccaatctctctctctctttaaatatttatttagttgttcaacatttattttacatccaggggtatatgtgaagatttgttacatgggtaaattgtgtgttgctgaggtttggggtatgaatgatcccattatcaaggtagtgagcatcatatctgataggtagttttcccaccctgcctccccttttactctccagcttcttgcagttcccagagtctattgttttaatctttttgtccatgtgtactcaatgtttagctcccatttataaatgagaacgtatggtatttgatttcctgttcctgtgttaatttgcttaaggtattggtcaccagctgcatccatgttgctgcagaggaaattatttttaatggttgcatagtattccacagtgtatagattgattccatgtctttgctgttgtgaatagtgctgtgatgaacatacaagtacatgtgctttttggtagaacaatttattttccttttggtatgcacctggtaatgtgattactgggtcaaatggtagttccgttttaagtactttgagaaatctccaaactaatttccatagtagctgaactaatttgaatccccacccacaatgtataagcattcccttttctctacaacctatccagtatctgttatttattgactttttagtaatagctattctgactggggtgagatggtatctcattgtggtttttatttacctttctcaaaacattaaaagtcacctatgacagacccacagccaacatcacactgaatgggcaaaagctggaagctttgcacttaaaaaatagaacaggacaaggatgctcattctcacttctcctattgaacatagtaatgggagtcctagccagagcaatcagggaagagaaagaaatagaaggtattcgaataggaaaataagacatcaaattatctctctttgcagatgatgtgattctatacctagaaaaccctaacgactctgccataaggctcctagtctgataaatcacttcggtaaagtctcaggaagcaaaaccaatgtacaaacatcagtagtatttctatacaccgataatgttcaaattgagagccaaatgaagaatgcaatcctatttacaatagacacacacacacacacacacacacacacacacacatcctaggaatacatttaaccaaggaggtgaaagatctctataaggcatactacaaaacactgctggaagaaatcatagatgatacaaacaaatggaaaaatatcccatgctcatggatcagaagaattgatattgttaaaatggctacactgcctgaagcaatctacagattcattgttattcctatcaaagtaccaatattgtttcaaagaattagaaaaaaaaactattctaaaattcatattgaaccaaaaaagagaccaaataaccaaagcaatcctaagcaaaaagaacaaagacagaggcatcaaactatccgacttcaaactatatcacaaggctatagtaatcaaaacagcatggtattactacaaaagcagacacataaaccaatggaatagaatagagagccaagaaataaagctacacacctacaaccatctgatcttcaacgaagtcgataataacaagcaatggggaaaggactccctaagccatgtgcagaataataaaactgaacccctgcctttcactgtatacaaaaattagctcaaaatgggttaaagatgtaaatgtaagatcccaaactataagaatcctagaagaaaatctaggaaataccattctggacattgcccttggcaaataatttataactaagtccccagaagaaattgcaaaaaggccgggcacggtggctcacacctgtaatcccagcactttgggaggccgaggctggcagatgacctgaggtcaggagttagagatcagtctgcccaacatggcaaaaccctatctctactaaaagtacaaaaaattagctggtcgtgatggcaggtgcctgtaatcccagctactagagaagctgaggcaggagaatcacttgaaccatggaggcaaaggttgcaatgagctgagatggtaccactgcactccagcctgggtgacaagagcgaaactgcatctaaaaaaaaaaaaaaagaatgataaagaaaaaggaaaaaaatagaaattgcaacaaaaacaaaaattgacaagtgggacctaattaaactgaacagcttctgcacagaaaaataaactatcaacagagtaagcagacaacctatagaaggggagaaaatattcacaaacaacacatccaacaaaggttgaatatccagaatttgtaaggagcttcaacaattcaataagcaaaaaaccaagaatctcatttaaaaatgggcaaacgatatgaacagacacttctcaaaagaagacatacatgtggtcagcaaatatatgaaaaaatgccgatctttttttgttgcagttctagtttctggcaaattttttaaacttttatttccaaatgtctttgttgtttaaaagattttagttattatgtatttttatttctaataatccttttttattatgagtttaattcttataccttcttgttcttttttaatgcaattttttttcctctggcctctctgagaatcttaatgcaagtctattggaggtcttcttttgcttcctgcatcacctctgttttatttggcatctgtctttcatgctgcagactctcctcaaatgcctgaggatcctttgccattcattcaaattgaagagatagtcactaggaacccaagaatgaaacaaaacaaacaagacaaaatctacaagaagtcacaagaaagttcagtaatgtggctggatatatttcccaaaagccagaaagcttatagaaatgatatctaactagaaaaatagtaggagatcagatgtcactcacaatgagggacccaggaattatgctagcaaataatagaaattcttttgtattagtcagggttctccacaggaactgaaccaatagggtatatatagatatacataatagatagatttattatgagaattggctcacacatttatagaggccaaaaagtcccatgatctgccatctgcaagctggacacccaggaaagacactggtgtaaatcaggcttgaagttcagggtgctcatgatgtaagtcccagattgagcccaaaaaccgagaaccaggaccaccgacgtctgaaggcaggagaatatggatgtcccaactcaagcagagagaatggctctcccttcctctgcctgtttattctaatcaggacctcgagggattggacgatgcccacccacactgggaagggccatctgctttactcagttcctccattcaaatgtggatcttttctgaaattaccctcacagaaacactcagcaatgatactttaccagctgtctggacaccccttagccaagtcaagttaacacatcaagttaaccatcacagccttcttggtgacaacacgaatgcctcattaaaatgtctaagataagaactgattcatacatggaaagaattagcattgtattcattttagtcctctgaaatttaatctataaatccaatgcgattccaattaaaattctggaaggttttgtttaatgaactcaacaaaatggttgtaaaattatacggaagaataaaagtgtatgaataactaacacactttgaaaaagaagagcatctattaaaaagtcagtagggttagataggaggaataaggtcaagagatcttactgtacaacatgatgattatagtaaataacaatgcattgattcttgaaaattgcgcagagtagattttaagtgtctcatcacaaaaagataagtatgtgaagtaatggatgttaattagctcatttagccattccacaatgtatacatatttcaaagcaacatgttgtacatcataaatatatataatatttgtcaactaaaaataaatttaaaatccactagaactgacaaatgagtgtaacaaagttatacaatacaagcttaatgtaaaaaattgtgtatctaccaaatcaaaaaatcagaaattaaaattggaaaacagccccatttataataggataaaatgtgaaacatctagggatacatctgataaagaaagactaggatactgacaattctaggtcattgttgagagaaattaaagatctaaacaaatggtgagaaacactgtattcacagatcagaagacttaatattaagatgtcaattttcctcaaattgatttacagattcaatgctatgctaataaaaatctaaaaggattttttctgtaagactgagaaacaattctaaaattcatatggaaattcaaaggacctggaataaccaaaaccctgaaaaagaagaacaagtttggaaaagtaacatttaccaatttcaaaacttatggaactgcagtaatcaaatcagtgtagtatttgtgtcaagacagacaaatagactatggaacaaagtaaagagcccagaaatggactcacacatacatagccaactgattttgaaaatgatactaagacaattcagtgaagaaaggatagtattttgagcaaagggtgatggagcaattgtatatccatatgcacaaaaaaactttgattcacacctcattctcatcatgtatgtaacaaaaataaacttaaaaggcatcattgacttacaagtaaaacctaaagtataaactttctagaaaaaaatttctagaagaaaaataggagacagaaaataagagattgggagacaatatttgtaaattgtgtatctcataatttgtgttgagaaaatattaaaaactcttaaaagtcaacaataaaaaatatcaacctaattaaaaactggcaaaagatctgatcagatgatttaccagtaaagttatagagatggcaattagcatattaaaaaaatgctcaacagaattagtcattaaggaaatgcaaattaaaatcacaatgagacagcagtcttcctctatcagaatgtctaaaattgaaaaaaaaattactgacaatatcacatgttggtgaggatgtggagcaataggaactctcattagtaattgataggaatgcaaaatggtatagacactttggaaaacactttggtagtttcttataaaactccacttgcctgatgacccagcattcccacacctaggtatttactcaagtgaactgaaaacttccttccacacaaaaacttgcaattgcttgtcgtggtgttactcataatcaacaaaagctgggaataatgaagatatccttcagcaggtaaatggatcaacaaactgtggtatgccatgcagtggaataaaactcagaaataaaaaggaataaactactgacttaataacaataaggataaatttcaaatacatgtgtctaagtaaaagaagttagacccaaaagatgccactgatgtgacattctaaaaagagcaaaattacagaatgggaaggatcaatagttgccaggagctgggggaggggagaaggtttgaccacaagagggcctcaatagagagtgtttagggggatggaacgttctgcatgctactcgagtcatagatacttgactctatgcctttgtcaaagtccgtagaactgtacaccacaaagagtgcacctagcattgagcgaagaaggtaagaaacagaatgaaatatctcaataccatatatgtaaattagaaattcgcacatgtacaatacaatatatattttaagaaattatattaagtacatcataatgactgcttatggggagacaggattgtggcttgaggataaaggggaaacagactaaaacaacagagaacgttgcatgggccaatggtgagagtgtgtgctgagctgagaagtttcatgaattcaaacacgtctatttgaaatctaaacaaaacaaaatataaaactaaaattcagaccaaggcacaaaaagctgattggacactctgagtcccaggcatgtgtgtgagtgagggctggggctggtctattgagagccttcccagtagtgtgattaggagggacctggtcatccattgagggaccccaaatgtcaattcattttctcttggacagctctggagcttccatctcctcttgggggaggggcagatgtagctgccaggcttaagggagtggaggagggaaagggcggaggatgcgaaggctcatctggaagttcgcttcgtcccttttggagtaaggcacttacacaagtccttagcagtaactcacgtccctgaatccagagcgtcttctctccaggttccccaggacggataccgcgagtgatctgagggctctgggaagaaactcacctggttctgctgggtatggagaggataggagaatgcattttttcttattcagagttccacaaaacctctgtttttagctccacatctcattctcacctttatcgttcctggaacctccaattccagagcccttacaaggtgttactgagccagattgcaggcttcttactgtcttccttgctgtaggcttagctttcacctttctaacttctccaaattttgacatctcttatccgctgccacctctatttttcttttctccttcatagatttatggattttaattccatttagccattttactggaattttgggaaataagtggacacaatgccacttttatctgctatgtttgcttgaagacaacaccatgctattttactgggcctccattttctcctccttaatgtgagggttaatggcactatggtgaaatgaactcaggaccacagccaggtgtggaggagacaggacaagatgagaaggtaaacgtacctagtttggattcccggctccactgcatactgcctaggtgagtttgagcaagttgctcacccttcgtgagcctcagtttcctcagtagtaaaatggaggtgttcatactgcttctacccagttccacaaggcatatagtaggtgttcgctctatgctatttttctttccctaagggaatgcataaaccggcagtctcaacactatcatggagaaatttgttatacgtggcaattatggcaatggaatccaaatgagtgtctgaagcagggcagagtccagtgagaatttttcctaagcaaagtctctcccactcctctgccctgttgctcaggggtggaagcagattccagactcactatctgaactctgggggccatcaggagatttccggcaaagctgggcttttttccatgcacaagcaggagcccataggtctgagtaccatgggggcaggagggaggcagcaaggagccctttccttcgtgtgtcttggtgtgggggtgggtgggggtgggttgcccactgggtggcaactgataacagaccttttaggcagagaacaggagttccttgaaatcttgagagttgagagattccagaaagaccttgccatccagaagaagtgatacatgaggttccaaatatgcatgttccctgggtcatttttttgcttagctgcatgcatgtgagatgtgagccttatgtcacaagggttccaatggtgtgatgcatcttagatcttgtcctggttctgccaggaatttgggccagccacttcctccctctctgagcttagttttttcatttgtaagaagggcaaatacacagcaagtgcacttctcatgtgcacagctccagtgatatctggtgtactttccaaatcttcagatgtgtttggaacactgagcttattatatatccatcttcaggttgacccagtggaagattctgcaggtaattattttgctgatggcttttaatcccttaacagacagatattctttctgggaccatgacactgttgtggcacaagtctgtggggtctggaagcatacccattgtcaaaaacatcctcttttggtggtgataacagaaaaatagtagtgatgatggagaaacacagagatgtttgccaagtcctgccaggtgcaagtcatctcatcatcctgacacaggattgccagtgtctccgtgatcagtaaatgggacacatgtggcacttgtgcctctctgtcatggggccagacccttgggaagagtgaggaaatcatttatcctgtgacggtcaatgtgagaagagatggaggtgagagtgagaggacagagggagacctgatcaggtgaccatctgcctccttttctggtcagtgatgctccttcaatgctgactacctggggctgagaacacacatggccagtcaactctctgggtcctccatccatgagcttcgtcatgagacaccccgaggatagacattacctcccatgcagcaccatgggggatgctcggtcccctggagaatggccagatttctctggggctttgtgaggactcctgtggacagggcaagatgaagcttggaccaacagctgcatcatggagccagcacctccacccccaggcaactttctgtggattatgagtctttaaattccattgagtccc[450 bp omitted]ctcccaacctccaccctcaagtaggcctccgtgtctgttgtttccaactttgtgtccacatgtattcaatgtttagcttctacttataagcgagaacatgtggtatattgttttctgttcctgtgttaattcacttaggataatggcctccagctgcatccatgttgctgtaaaggacatgatcttacgcttttttacagctgcatagtgttttatggtacatgtgtaccatattttctctatttagtccactgttgatgagcatttaggttgatttcatgtctttgctattgtgaatggaattgcactctttcatatcatgattttatattttttactggatgcataaacatattcccatgtgcttataaatttttcctacagatcgtggctgaggacatacagtagattaattggccaatcctctatttttggttaactggtctattgtaagcttcggctgttatgaataatactgaagtcaccatttttgtgtattttttgaaaacccaggatcaattctttagggtcattcccagagtggagtacatacacgtttaagttcttggtttcctaagggagaggccaaccttaggattccaatttccatgtgcccaaggagagcagcatgagttctctgctcacaaaactccttgtccaagaccagcagattggtctgagtctgactatgagctatattactagcctcctcctcccctccccgcttcccctctatgttcctctcttggtgagggctgtgggcagcagtggtctgtgggggccctgaagaacattctgggctgggggtgcttccttaggcttaaacaattccactggaagctattgcccctgagcatgctggtcccggcctgtggaaagcctgtcaggccaacacacgtgagcagcctttgttccccagtgtggccccacagaaacagagtgactaatgagggttccttcctgtctcttcaaagttcagcaggggctcccaggttcaaaggacggtgtctgactcactttttcccattccccaaaggcaactgcaactgaacaacactgaaaacacctcctaccctgcccaaacagaccccatcctggggggattacttagtccagggcccaggcagagctggcaaaaacaacagcatccccaccagggataggcacatgctgctttgggaaggatgcctcctctccagcccagaggccccccgggggcgtcagactcttcttccaacctgcctccggcttcgtccttcctcttcagttgttgcatattctactgttggctttaattttcctttgtatatgagcactggagagagggctggtctgggagtccccatgcctgatggtgaggccaggagcctgtggtcaccagggcttggtcaaggactgggaaagtgaactttactagaggaggacacatttttcaggagaaaggaaggttccaagccaactttgcaacctcacagacttggctgtgtagctgagcttcatgggaaggtcccagtgttgtcatgcaagaattgtggctgcacttccatacccatggttggaggtccaccctcaacaaagacttccatgctggagcacgggtgacaactacttggccaccattagaggcacataccacagcctagcaaaacaatctgttgcatttgtggaccactttgttcttttcacttacttcgaatctttttagaaataaagaaggacttaggtaaataattatcctctttcttatgggaacaaatcgtctgtctcccagaagagtccacccactgtccattcttccacccaaaggagccagcagagcaaggtgagaactttctttgcatgcaatgagtccaatgtttagatgtcccaagtgtctgtcttctttccggattaaacacttctcttccttcacttgtttccacatgacctggatcctacctgctcactcttcctaggacgagtccctttccctcatagaatgtgggtggaaaactacacaagtcttcagtccaacccccagcaccccaggggagctactggtactcatgctctggataccctgtgcctccagactccatcacactccagccttgcggagtgtgggcagccacagcccaccatgctcttagacccagtttacactcagtgagtatccccaggtgtttaatatgaatatctgggctactacatcaagacactggtcttctctccatattcaagttttcttgattgtattttatctcaagtctatttagaagactggcactgaagagaccaatcatctccaacaaatctctatgatcacgacataaaatgtaattcctggagttgctgccaggcatagtgacgcttgtgaactgggaggtgtgaagatccacatggaccttccaaggtatgtgtgagagatggggaggatgggagtggaacaagctctgtgcagctgggacttgtttacaaaacacacagcattgcatcaatattgacccatcacaattccctactgattaaggacataaaccatgttgcagaggaagctttaaagaaatgcaagcaggtaccttgaaaagatgttcccccaaaagtaaacttttcaaacagaataatattgacaactttctcggtgttccttgacttcttctcactgtctgtgctgctcagagctccatctttacaaagccactagccttgcagctggtgctgattaggagagcgttgacagcatggttttctcttcctactaactatggggttggaagcaaacattgattgagtttttactaggtagcaaactcctgctaggcattctacatacttgattccaccaccactggtagtcttcactataacactgtgaaatatgctcttttctccatttcatttacaggaaagctgagggtcacagaggtgaagtcatttgcctatgttgacaaagctggtcatgacatagtttggatgggaatgcagagcttcttgattcaaaagcccatgctttgtctactgcttcagactttagaccagtgctgtccaatagaaatagaaggcaagccacaaatatgaagcaaatgtgtcatgtcgtattttctcatagccacattgaaaaagagaaaaccagataacattaagtttaatcgtatgtgctatttaacttaatggatccaaaacattagtattttaacatgtaatcaatataaaaattatgacttttatattctgtttttgttgtaagtctggaatccgttgtgtaatttgcatgtgcagcacatctcaattaggactggccacatttcaagtgcttagtagccacatgtggtagttggctaccatattagacagctcagctataaaatataaaaatagctgctttgtttttctctcctagatattctttaaagagaattattttttaatgtttttcattgcatttgaatgttgtaagaaagtcaatgaattattaatgagtaagaataaaaatagatttttactcaaattattctgctcaggctgccataacaaaaatcctacatactgggtggcttaagcaacagaaatttattttctcatagttctggagggtgggagtgtgagatcaggtgccagcatggttgggtttgatgaaggctctcttcctggcttgcagacagccgccttctcactgggtcttcaggtggtggagagagaaaggtgtggtatctctttttattaaagctctaatcccatcgtgagggccttcactcagacttcatctaaccctaattacctccccaagtctcctccaaatacaatcaccactgcaggctagggctttagggcttcaacataggaatttgggggagacgcaaacattcagtttacaacatcactgaataaaacacaaggtaagaaaatttctcacagtgctcagtgatgcaaaatgtcctggggtaacctctgaggataatgtagaaacttccgttagtgtgtattgtgaggccagcatgttgcaggtatgcccctgcaaagtaaagatttccatgaaaaccctactctttacaaatctacagtcatgttttccttaattcttatatcaaaggaggcatctttaacccagtttttaagactcagacatggaggttctgagattgagtgatatctggaatttctacagaatatatttggaacccaagacacaaaggtagacagagcaggagccaggtcctcccccacagccttctgagcccaggctgtctcctatggccagtgcctgctgctttgcttgggaacagttgctgatggcatgttgctatctcccatgggaactgaggtcagcctggaccctgttctacatacatttgtctttttgtccttttcaagtagcacggagctttaacaggttttggtttattatgtgagccaagtgcttggtggcttggccagcggtcctctatgctgatgcccagagagacaggatctctttgcacatggtgggggatttctagagcgagatggctggggggcagggtgggggtggggcgggagcggggtgcggaggcaggcatttgaacaggtcccccttttgttgtgatttgtattgctagtttctttccactgggtcttgtggtgtctcttgagagtggccgtgagcccagacagccactctctagtggagctctgatgggggaaattaggttcaggtgtgtgtgtcaggttagacacagtgaagaagtgaaaccagaatgcatgaaacagggaaaacatttcactcacaggcctcacagcagatggttgcacactagaggcctacaggaagtcaggaggtggcaggcagcttacccagtgggtgaggaagagagaacacttgtgggactctgcttttattaagactcatgggcattatccttaggctttcctttggggttgtggactgactggtttaaagaaaacactcttgaagtggggacttattttcctgactctggcatgaccatttggtgttattatggtcaggtattggattttgggtcagtgggatgaggaacagccacacggggagaggaagttctgagtctaaaggcgactgggtacaactgagttccaaacagcttatgtcaggcataaaaatggatgctgaggcagcgattatattaaacaaatttatgacaatcttgttattgaagctgctgttccttcttttctacatccttcaaaccttcactagagactatctctgtgagaccccagctgggtcaaaggtgcacagcgatggagtggcagatccctgctctcagctaccatagcatggccacaggatgaggagagaggcagacacactctgaaatcaggacacgcgtcagcaagcattggcttatcagcaaacgacagcagacaagagctcctggggctctggggaaatgctgctgcctgctggccaaacgaactgatggatgggctcttggagtgggagagactgggcagaagctgtgtggggtgggtgactcccaacctaaagaacccactgagacatatgtggcttccctcttccaccttcattgcctctttccgtctagatgctggcaaggggggacttggtggacaaagagagctactattcattcaggagctatgttacaccagtcactttacatgtgccacttgctctgggttaaactgtgcctcccctcactcatatgttgaagtcctaaccctaactacctcagaatgggacgttatttggaaatagggtcattacaggtcattaaggtaggctgataatccaatatgactggagtccttataaaaaggggaaatttggacacagacaaacatagaaggaaaataacatgtgaagataaaggcagagatccaggtgaagcttctacaagcctaggaatactaaacattgaaatcaaccaccagaaactcagagaaaatcttggaacatattctctctcacagccctcaggaggaacaaaacttaccagcaccttaatctcaaacttccagcccccacaattgtgctacaataaacgtctgttgtctaagccacccagtttgtggtgctgtcttacaacagccctgggaaacaaatccattatttcactgaatctgtagagcagctccatgaagaagataatattgtgcccattttatagaggaagaaaacaaggttcagggaagtgactttcccaaagttatggtttgaaaccaaatctgtctcacacccaagcccactacatcctcgtcttccagccgggatttgccttcagccttggtgtcagcactcaagtggggggcaggcagattagtccctcaggaaagcacttgtttcttggaagtacagtctcctgtaggttctgaaaggcaggctgatccactggaaacaggagccatgtatcacgtttcagaaatccagctcctagacaagccccctcaacccgtccccctgagccctgcccagaaagctcccagcatggacaatgtgcatttagctcaggcctcctcctgacggagctatgctcctgcctcaaaagccacctcagatggaagtcccctcttggatgacagaaatgcccactgacacagacatgcaaatgttccattggaggttcctgagtttcacccagtcctgttataggcaggcatatcttttcacctgctctatgaaatggaatggaaagtggagccgaaaggcagttgtattgaccctgcctttcattcactttggctccataaatcaaagagcagtcatgcagtcaggcccccagtaatattccttcaggatgtgccgcaggcatggtagattgtacttactgggtcaaataaataccttttcatctgtccgtaatataggtagctatattactctttgcagtgtttctcctattaacttgatctaggctctggagtgattttcctgaagccatgggatgaaaccaggcatgtttcatgcctcctcctgtccttcttcaactcccctagcaggaaggcatagggcacagcccaaggtccagcctacaccaagactagctaggacccccagcaggttcacaaggattcaggacaaacgagaaacactgctactaatttaccatgaaaggtgtatcccatggactccaattcctttttacttttagttttgcttagaaactggaaaagcaaaacatgctggttttacaatattgcttgttacagaggtatataaagtctaacttgaacgtacccacctccttgcaattcaaacaaatttaaaagagaaattgaatcataccatatagagtgctttgcaatcaccttttcactaaggaataaaccagccgggcgaggtggtgcatacctgtaatcccagaattttgggaggccaaggtgggaggatcgcttgagcccaggagtttgagaccagcctgggtaacatagcaagaccccatctctacaaaaattagcttggctgggtggacatgcctgtggtcccagctactggggaggctgaggtgagaggatcacttgagcccaggaggcagagtttatagtgagccgagatcatggcactgcactccagcctgggcaccagagtgagatcctaactcaaaaaaaaaaaaaaaaagaataaaccaaaccaaggagccttttagatcagtaaatatagttccattaaacactttttacttcctcctcagttttccatattttgttttgttccatattttggttattttggaagtaaatattatcccctgttgatactatttagattgcctacactttggggctgctataaataagtcagctattaatattttcatgcttttgtgcaagtatttctattaagataaatactgagaaataacatttttgagtagagaaaactctcacctcgaatgctgggagatacccttcaattcagctgaaaatgtcacctctttgcattgtccagtgctttgtaagagaccccattttcccacccagtcacaccttggatattatgtatcatttatgtatttttgtgctaacctaaagggaaaaatggaatttcattttttccatctgaagatttgtgagaatgagcatcttattctatgtttaccagccttcctctttcttctgtgctgtgacccttaagaacttggcgctttcacttttcctattgagttgtttcaagttttgtggttaaattagtcagtcttctgcttttaaaacaatatttctggtttcctgccttgcttacaaaatacttcctttactcaagattggaagactcattgtcccagagttcttggttgtaagcaatagaaacttactttattaaacataggcagcaaagagacttagaaggataacggatgtcttagtaagagattgtagtgtttagaagcaacccttggacaaaaggccaggatagagggatgccagagagccaaaaacaagccaaatggtgccactggagacattgccctggacgcttgctgccaagaggctgttctgattctgctgctattgtctacactagactctgggtgctgggtgctgccatcctaccatcacctccaccacctgctcctccaccaccacccccataacaccagcacctcccgccacttcccctccatcccctcctctggcatctccaccatcaccatcaccataactagagtgaattctaaagtatcccctgattctttgcagtatgagtttcagattcagaatcctcagtgggagtctttaattgttcatacgcaagctttcactgtcaagagtcaaggagaaaaatctaatatttgtgttcatttggggggaattggtatcctaataatattaagtcctcccatctaggaacatggtattgttaccaagcgatcaatgggcttggtgtccaattcacatagaggccaatgccatggcaccagcttttgagaaaagaaaaacagcaataaagctgcttaatgggcaagaaggcaagagaaaactctcaaacctgtctcctcgagcaggggtttgggtcaggctttataagcatagggtaatgaggtgtgatctgattggatcttgcaatgaggtggtgccaggaggcatgatcttactggatcctgccatggggtgataccagagcttcctctgattggatcctggctcctgccaggcagtgtctgcttctcagttcagtcccaatttctcagtcccagccctgaggttcctcctgtggctgtccatttggttcgcctgagcacgctcagattacatcaccttcaatctgggggcccatggtaacctgaaaacaactcacaacttggtttcataaaagttgaaccacataggtgtgatgaagttacagtaggtgctaaaatctcccactgtgattgtgagactgtcaaattctaggttttggaatttcaacaatgtagtcacagtaagtttcgttaatgagatgccagtcttacttattagtaggtgatgatgttttctgtctcatgtttctgattttctctttattcttcatgttttaaaatgttagatggttttattttttcattaatcctaacaagatatgtgagtcactttaatctgaagttctttctccttgtcttcttaccctacgttctgacagatttccttgactttatctttcagttcatttactgatgatcactttgaagacaggaattggtgggtcacacttataatgtctaagaagatgtattgccagaagattctttaatgaatgtatacgtttcctgaatttctgagaacagcaattagagtgctttaaaagttttccttagttcatcgcgtcatctaggtgcttcgtgcctcttccctctgcccttcccagtcttcacggctacatgctgactggctcttctgcctggtgcacccttgtttgagaactgggctggttcttccagatggctgctacagtgggttagttcctgcagtcctcttctccaggaggcttctgagggctgagctgactgcttggagctctgggtacctgggctcatccgctggcagccctgcctagggtgtgcaatggacagctggtcttgaggtggaaggcatggctgctaaatcagtagttgatgtcagaaggcaggacagttcatgttcacctgcatctcctccagcccctccagctgacctgggctgtgcctggctgccagaggaaggccccttttcctgtatccatttgttcagaggagctgacaaatggcttcctctgagttcccaatttctgctgggattttccattccatcctctggcctgtgccagtagtaacattttacacttgtctgacaccttttctcctctgagctccaagcactttacaagcaagcagttgctattattgccctctgaattctgatggaaaagctgagagtcatgggatcaaagccgccatgattgggcagtgaagacaaggctcccagacaccaggccagtccccggcccttggcaggaccacatagagcaccccagctgctgaggtgaggtagcccaggggagggttttcagcacgggctccctagaggctccccagagccgtcttatcctgttgtaaagtgatgcattgtcctttactgcagaagagagtgggacccttgggactcttccctgccagaaaaagtgggctgatggttcgtggtttattttgggaatgagaagactcattcaatctgtaaagggtcctcatcttgtcttgaggaacaggaagcagatctgtattacgtggcccaggcagcggaataaggttcagttgctacaggttttcaccagtcagaggacttgttagcactgagagctgcccaaaggggagtgcgtttgcgtccctggttgggtcccgaggcaagtgtctctagctgctgctggggatgtcctgcatcacatgatgctagggaagggtgacacatgaggcctcttccaacccagatcttgcatcataaggacacactctagtgctatctcctctaagtggtggtggccttggggctgaaaccctgaaaccctgggtcatgtcacatcttgctggatctgcaaagctccttagttcccatctcctccttctttcatttagcaaaactcggtttgaggtctgcattttccctcttttgtacgaagctttgcccagtagcagcttactgtttaactggaaggaacatctgtgaccatgaaattttcagcaacctaaaaaggccctgttaagtaatatttgctgagctagtgttgggagtcagcagtgtgtgtgtgtgtgtgtgtgtgtgtgtgtctgtatgtctgtgtgtgtgtgtgtctgtgtgaattcagctgccctcaggcaggtggctggaaactggctcacctttatctgagaacacatcaatcttgggaagagaatccatggaactgagtatggagggacacctggccagaaagaaactgagaacaagtcattcctaccccagggaccacagaaggaggcagacagctggaggaatgtggtgtgtgtgcgtgtgtgtgtgtgtattagagaggggtagaggactatattttctgggcagatagaattctgagcacatctgtgtgtgttaatgctcacatgaaacctttcaaagcttggagagatgggtattatgattctattttcccagtgagggattagaagtcaaataagctgcccacggccccagccccggccagagcagagctgggatttgaacccagttagttgtctttggctctgaagccctttctcctctgtatccctgcctgccttcaatgcaggtgccacaaatgaggtcccacggaccctgctgactggctctgagtcttccggctagcccggctgtcccaggccccaagtgctctttcccaagggctggctgccttgcaggtctccagaagcctccgggtccacccccatgcctccccagatgctctagagagctctgggcccaggcccaagcccagcagggcagccctgtggtttgcgatctggccatgcatagctggctctgagcaggcacttatcattcttccacgaccacccagtcagtctaacacagcctggaagtgcagctctagctgcccaggccggtggtggctcagtcctcactgagccctgctgctcccactcgctgtctgccacccccgctgtagccggccccgcctgcccagctgagcgagaggtcgctggagcccagaaacagcagggtctgagcatccctagcaaaccacaaagggagattcacaaatcaaaagggccctagagaacaaagctgtcacatcagtccatcatggagtcggatctcaaaatatcgccaggccagagtcctgccagctgtgagtcaccacccggccagagcagccgcagcgggcccccagccacatggaaaaacacctcggcagccagctggctgctctctgcccagacctgggaggtgtagggtgtctgtggggtggttccacacctccatgctgcggtgtggagaggagtcagccctggtatgcttgctgtaggagcaggagggaggggacaagggaacggccatatcgacgatggcttctgtcttcctaaggacgcagtccaggcctgcttcatccctccaaccctgctccaagcctctgggataaccagcagtgtgaggctggttgacgacagtggctcagcacagcctttgatgtcaccctttttatgcctccctgtggccctacactgctggcccacctcttcccaggtgatgagaagttggattcagggcctatgtaagtccagcatctcatcgcaccaatgcctatggcaatgcacagaccaagagcctgcacttggtgtgctgagtccctcttcatgcactgctccagttcctaccccaagccctatcattacacatggtggggaggggcatgggggcacgcacatagggatcacgtccttttgtaggagtttaggcattctcctgacattgcttctctctcatccaccatcctgagacctcactccttccgatcagcatcctttgtttctcctggctttgaggccatgacacgtgtgtctataaatatgaagtggcctggatgacaaaacacaaagttttgaactgatttttgttgtcagctcattttttccttctgtgcctcattttccccacatgaagagtaagacgagatcttacagagacttttggttctaaaggctgagggttttagaatttggggtgccacctgccacccctccctgagctggagccatagcatattctaacgggcttcatctttagtgaactgaacattaatgaggaacattaatgttttattcgggcaaggaggcaacaaggactcaatttaagggaacatgagatgtcagtcccagccccttccattctctgagcccccttgctgtcttgtccttggcgctctcctctaaaccctggccttggggctacggccccatcagagctgaatggggtcacctctgggctgggtagagcctgctggggcacagatttgaggcttcagtcacctctttgccctgcacaaatgaccagagcctgccttgaacttctttgcttgcagccagagtctcctgccctcagctgggaactgaccaggtgggggtgcaagctgtgatgccgttttccccctctctcctgctgttcatccccatgcagcccctctccaccctgcccacggcctctgcttggctgttctgggccgctgtgtgatcatgctttcctccttggaggcattcatgctgaaggcatggagagaacccgaatggcagagtcctgtccactgtgcagtgatctctgcagacctgggccaagaggtccttagagagagggcatgggcctcagccagcaggatgaaggctgctgagcagcagctatgcagaacaagcataagtggtgacatcttccctgtcccagatgccacagagcgcaggggtgtgtccagatatgtatgttcctaggtggggtgacagaagaccactggccacctgccacctaccacccctccctgagctggagccataacaaattcctgagtacccagtgtccctctacccagcagtcagagtctctgagagctcaggtacacctgggtccattcgcaagttcataggaaagggcatgagtgtttgctctccggtgttacatgccttccaaggaatcactaaacttaagctagaggagatttgcctcttatgattgcccattctttcccctgtgggtccccccaccactcactttatttagttatcgtattcagtaaatacctgtgagggatctggaattttccagttggcatagacaccatgcattagtttgtagccacccaatttgagggatcctgagtgtcagagataactgtgatcctataattaaaagttcctgcttccccttttaagcataacgtaaaaattctgtttaaaaaattaagatgaaattcacataacatataatcaactgttttgaagtgcatatttcagtgataatatttaatgtgttctcaacactgtgctacccccagctgtctagtttcaaaacttcttcctcaccctacaaaaacacctgtattaactaagtaatcattccctatcccacttcctgtcatgccctggtaacctctaatctgcttcccatccctgtggttctacttattctagatatatcatataaaaataaacacaacatgtgactttttgtgtctgtcatcttacagcacttagcataatagcacttagcacttagttttcttggtccactcatgaaccttttcaagatttttccttttttatagctgaataggattccatcttatggattagccaaattgggcatgctttcatcctttgatggatttttatgttgttattcatgaataatgctgctataaacatttatatacaagattttgtgtggacggatgttatcatttctcttagatatatgcctaggagtggaattgctatatcatatggtaactctacttttaactttttgaggtactgatgaactgttctccaaaatggctgcacaattttacatttcccccagcagcataagtgggtttcaacttcttcacttttttaccaacacttgttgttggtctcttcaactcaagccatcctggtgagtatgaagcagtgtctcatagttttaagttgtgtttccccagtgactaacaatgtcaatcatcttttcatttgcttattggccatttatatagcttccctggagaatgtctatttagaaatttgcctatttttaatttttttattattaagttataagaattctttataaattatggatgttaggcctctatcagatatattatttgcaggtatttgctcccattccatagcttgccttttcatatccttgataatggtctttgatgcacagctgttttaagttttgataaagtccaatttatctaatttttcttttgttgcctatttatttggtgtcatatctaagaatcctttgccaaaactatgattgttatatattctcatattttcttctaagagtttaatagttttagctcttatatttaggtgttgactgattttgagttgatttttgaatacgccacgaggtaggagtacaaatgaacctttgcttgtggatatcgagttgctccacttgaatgggcatgtttagagaaaggataaataaataaactgatgtcttttactagttagataaacaaaggtgtccatatagagatacatgtaaactggttcacatttttcatgttcagcattgttgcgaagttataaaataatgtgtgtaacactcatgtagttgaataggacctaatggtgccgccgaaggtgaatttaggagacataaatgattagaatctttggcagaaaaaagtacaggaatccctcccttcatgggggctgcactcatctgtgtggcattttctgttttgctctgaagccctgcatgacgtctcagcccacattcaccctgggtgtgccagtggcaactgcctcgttgctgggtcattggggcagacaaggccagccctcagagacagcttctgccctgggaaggcaaagctgccaccctggagcatctcccaggggccatagtgccttgcatctggctgcggggaccagccctgggtctctccctattagtggaggactagtctcagatgtcaccaccgcatgtctggctattcatcaatacaggagagtgctgaactgagaatgtgatttttttttatgggttcacatcccaggaacagggtcatgagctccactgagctcagttcttaaatagtcattatcctaggtggccacccttgggagtgccctctgggacttaagtcccttcagtgatctcttgcttgatcacttctaatgattgtgcttgcttctctgctacccacttatgccatcaaccagaacaaaaagttctttcttactccagaacttcctcccttctaaccgtctcaatcagttacttgggacacacaacttgaatctccaagaccatcactctctctgctttctccccacctcttggatccccactgccttcatctgctcctcgcttgcttagactctatagatcaccactgcagccactctcctgcaggtctctcctgctttactttccttcggtttaggccccagcaaaaccccagccatgaattaatccatccacccctttctcagcactgatacctggcctgtttggtgctgctgaagaacatcagaccacgtgtgtgtgtctggaatcagaaccatcagaactcacgctcctccttcactctcagcattgcctcacctccagcccaaagccatggtgggagcagcagacactctctcttcaacccatctgtcaacctcaagatggctccctgtacccttgcccttaaggactacttgctggggctttggtggcacagttttgctcctgtcatcctctttatttacccctttttggttgctggttcctgccttgctcttccttcttgaagaaagagggagcccaaatttgccccattccctcatgtccagccccttcctttgctcactggcttctaccccattctcccagtgagccactgtagcccaatgattgagccccttatggctgaactcaatccaaggagcatcctccagcattaagctctcagggattctctgcaacactggagtgtgaaccacttcctccttggtttccacagtgacacgtcccttgcaggtgctccctacatttcccagcatgcttcttctccgtttcctttgcaggcaccttttctctgctggtagtttagatgttaggttttctctggccctgtccttgctcttcctctctcctctccctggctcactttgccaacctggagtctcccatggtctggtgaagcctggaggtgggtgacccttcccagcatgtgctacctgccgtactctctgtgtggcagccgggctgggagcagctggtggctccaccaggagcaccatgaagacattggcctctgggggtctgggaagttgaccctttgcacagcagttctggggaggtccctgtgactgtgcagccagtgaagcagcatcataggcattgcccgagggcttgttgatctaactgagagattggtagatctaaccgagagcttggtaggtcttggcttgctggctgagagtttgttagatctgcagggtctcggcaccccaagctcctaaaccaaatgcacgtgttgacaagcccccaggagtagtgcccatacagcagcatgtgaggggctgctgggaaccagtgtcagcctgctgagatggggcagagccgagagagagtcagggaactcagtttcttaagatgcttttgcttcaaaatagaggccaggtttccaatggaaatttcatggaaggagccctgtatttttttctaatggaatggaagcttatacttggtaagcaaaagattcttatttgaaaataactcttgttccaactttgtgggctcccaagggaatcgaattagagtagaggggagagaagcagtagcatccaagcagcctggctgtgcctgacgcgggtggatctcggggctgaactgttcccaccctcagtctggggccgggcctgggcccaacaccactctgggagaaggagatgaggattttctctgaggggctgtgtgcacaccctcaggttcctccttcctagagcagccaagggtagtgccgtccagggtacggcataggcccagcgaggcctgtccttccagccctgcctccctctgcccctcaggccgaagctcgaaccctttgctcactgaactgggcctgcagaactggagtacatgggcctgcgacagctgcatatgatcaaaatcacccctggttttgagctggctcctgaggccaaaaacaacaactcctcctgctgcacatgaccagggtggtttgggtttagttggtaactcgcccgtcaccatctctgcctccataatgagcacccctgggctgggcagaaaaggcctgggctgtttcaagaaatgagaggccctctgtggggccagtgtgttctggttccacattccaaatagagatgatggggatagagaggaagtgaacttgggatggcaccaggctcttatggtttcagacagaagagaaacgacagaacaagaaagctcctggcagcatctggaaagggccagggtctgggcttcagtcctgcagccatagtccagggtgttgccatgactggccatcatctcctgacccttcctgtgcagatccctggccatgggcaccctcctccactgctgggtgcctctcatccactgttaagccctatccctgaccttccaggacaggtgtgtcccacatctccataggaccctggtgcaccagcccctgggtactaggcactatcattgtaaccgcatcttgcctttcctgtaagacccagatggcaggcacagagactcactgcctaggatcccggtaagaaagtacttgctgctgcccagatgcggggtgtggttagctgagggctaacctctgggtgcttcctagccaacgccactcctcctggggccacccccaggcactgactgagcagagtggtggtacaagggcatagctgttcctgtccagcagcgcctctcctaatggcaaatccctgctgcagagctctctggtcctggcagagaccttgtctcagctgcatcccagcctggacactccctgccccgtcccactccctgcctttccttcctgtgtggtactcccaagacaccatttgcactcttaaatctgtctcaccctctgctgcccagagaacccagctggggcagcctggcagcactggggccaatgcagcttcagcacctggcatgcagctgtcaccaagcccaccggccaggtcagtcttcagagtaggaaggtgatgactaggccagaacacagagagctgcatcctcaatggggaccatattcctgccttctggggagggagtgaggaagctgggtgatctagagcctcctttaccacctagtctgcctgaggcatgctctggctgacaccacggttgcaggattcccagggatgcctgctcaatgttatatccctgaaagtgcatctgaggtagaaaagcatgggatagtgtgtgcatgggtgtgtgcatgtgcatggagaggcagctgtgggcagtgggtagtgggagacctttgacatccccttgtgggcctcctaggcttggggactggacttgggaagggagtcagggtggatgagttctgggcctcagcccagctcccttcccaaacacaggcaggatgtgagactttgggaagaacctaggaggctctgtcccagggtcaactccatataggtccgagtccctgaagggtgtggtgtaagtggggccaggaggaagtcttgaccccagggcctctccctgcctgtcttccaaagcctgaaatgccaccatttgggaggcctgcctttgcaactgcacagcttcagttttttggggggcaaaatcctaggtggtgaagctttaagacaaattcagccttgcagaagctgcctcagccttcgactcccagctcatgtgccctcacttgtgccttggctgcaccttgaggcacctacagcagcagcatggcctatactacaggtcttctcaaagctatgagggactgagcccagttatcccctcgcctggcactgcctggcacagagcatgtgctcatcaatgaagatggggtgaaagtcaggccgatggcaagggagacagcattgtcactcgtgactcagggttgggtgctggtttgcctggtgcgggaggagctgttctgaacactccatgctaatccctttgcttcatccacacagcttcatcctcatgagggtggactattgtgatctccatttatgaggaggactaagacacagagcagttaaggaatgtgcttgggtgtcacacagcctggcaatgggaggaagaccctgcataatgggtcaggctgtggtggggtgggtgtgggggtcctggggctgaggctcaagcttcagggccatccccaagaatcatttatgtcccatcaggcttacattgtcctgggggattcttgaaaatgtccagggagcctggtgggaatgggaagagacactgtggtctgggcatttgtttccaatgacatctgcactgttcaggctgcagccaggcctccctcctgccaaagcaccagctctgcagtgctgctggctggctgtgcctcagcaggtctgcactgtgctcagaagcttcatcagtgtgtttttccctaagaggctggggctggtgggcaccctgggacacgactgtgagtggaggaggccagtgctctggggcagaagcagcccaggcacactgcagggctggcgcatcctgtgctccagctgctgagcctccccccaccgcaccctccccctgccaccccaccagagggcacagggacaggcacctgccaggtgagcttgtgcccagaacacctggggtgttttcacacccccgtctcactgaatcccacggcacctctgtgttctccactttccagaagaaaataggctcagcagtcagggagttctaaggccacccagaggtgagtgggtcgggtggccagggtttggactcaacattcaaagagatggagaaacatgtctatcctgggtctgagtctaagcggtgagtcatttgggccaggcattaatccagaccattctcatttggatgagaacatgagtggcaggtgaggctcgcccgaagagccagcaccccacatgtaggaggggcaggcccagccccccagcttcaggcaggtcagccggctcctgcatgacacatctgcattgttctggacacttcgccacctcatcttcatgcatggggtggggtcaggagggagccccgcctttctgcctggaccggaagcccctggtgttccccacgtggtggtcctacagacctgcccttatcctgaagcacaaggcaggctggactcctgctgacctgtttcggttttctcctctgttaatctggaatgctaacgcatttttcacagagcggtggggaggacatgaaggcatgttggaggcattacagagctgcagtgcagaatcataagctattgctataagaggccgaggaagaaaactggactggaattcaagtgtcgaaggcaagggttagtttgtggggcagggatttccaaatttctgatcaggggtctctgggtgaggctccaggctgagtgagcccctctgctcttgtctgttcctgcctgtggccaatgccagagcaactttctgagggtcctgagaggcgtggtcctccttcaggtgtcacactggtgagatgccatctgggtttttattgagcctgatcagaagccataaatcagccatgaagcagatgctgggcctcatcccagaagtgtccaccacatacgagagcctcctgggtggccaggcattgccctgtctggagcacactggggcttggctggccaaggccagcaggctcccaggctccctggagactctagggaggaggatggctgtgctaggaagaagggccactttttcactttgcttcattaccagtgatgagaggctgcaactggcttgcacaatatggtgcaacccactccccgggggcccgtaagtcaacagaggcctaagtgtcttgcctgcccttggctgtggctttccttgaggcagaaggctggctgtgacacgctaggaggccccttctgattttacatttcttctctggggcccaatagggcctcctttctctgagctgctggagcagagtgtctaggaaacacacgttttcaactcctgcacagagtccctggctttggcctgagctaagtttgccactctccctattcccttccactttttgccctgatcagagaatcaacccaacctgccaccttgttgggctccgtgggactgaagagggagaggcagggcaggccccacttgcttgctgtggaaccggaaacccaggccaccctcaggtgggagaagcagcacaggcttagcagaacatggcccacagggagaagtgggactcagcaatccagatcatgggcttgaaaggaggcagggcctgggttcaaattcagatgcagacttcccagctgcactactggccccctgcgtctcccggggctgtatatgagcaccctgcagagcagttacaggtaagccctttagtgcaatgtctgagccccatatgcaaggggctggggaagtcatgggggttattactggtgccatgccacacagtgtatgtggctcatctcagccccttgatggtgcgggaggtaatattatacccattttacaggtggggaaagctaaggtagagaagatgatagaccattttgatttgccccaaatctcactggaatcctgatgtttttagccccaaaggctggactgctatttactaactttcacattatctcctggggttgaggtttgatgctcccagtaccctggatgctggtagaactgggtttctccagtgcaggacttagaacaacaagcttgtttgggcacaagcaacacccaccataattgagcatttcagagatgagaaagtatggctttcttctactccccaccatcttctaacaaagacatgtccattatgatgccacaaaaataacaaaccagaccaaggaaaacagaaagtaaaagtggagaagcaaggctaggtaaataagacacatatccatccactgcaaagaccaacatagatgctataattgagccccggagttcaccctgaacttctggcagcaaaagagagcctcaataggttataacattctcacagacacaaagaagccccccactggttgtggttgttcagggacactcaagatttccatggcagggctttgcatgtgtggcggggcttccagaccttctcaactgcaaatggtaatggccctccctcagctgcccctgaggcatttcctccatggaagccgagatctcaactccttaggtttctgcatttctggaaagggacaggcttactctcctttcatggaacacaggtggttaactccaccaaaagtcagtcgctcaatgggggaatttatctaatggggagatgcctgtcagaacagccactggacttctagacaatgactgtgtacttcccaaaggttcccattttccaaagacattctggcttcatggacacccggggctgtggccacacagagggtgggtgtgggttctggtgctgcacttggctgcaagtggcagaaaggtgggcttggagcatgtggggccagcagctgagatggcgatgcagttagagtcccacgcccatgatccctcactgctccctggcaccttccaaaggaatccagacattttctcagagacacagctagtgccagaagctgattccttttgatgatcctggggcgatgccatgggaagtttcctctgaaatgcaagtctgtctattccaggctccagagggacctctaaatccaaaggccctgctctcttcccctccccagggtacgtgaagggctgtctcagcttcttgcttgaagaatactccaactttcactctcagaagagaagtgtgagtcaagagggagggaaataattcctgagcacctaccttgtacctggtgcctccagtgggagagtcagcttctcagtttgtcaacaatggaggagttttctgggacactcaaactggaatagctggtcacccagcttcattaaccccacggcattctcatgaggtgggagctgtcactgctcattacagatgcaaaagctggggctttaggaagccatttgctccatttggggtccccagggtcacggtccttccactcccgcatcttgtcactcctgagggtatgagaagacattgaaaacctagcaagctgagttccctgaaaccttctggctttccttggcttgttctttgcttgctggtggggaggtcttccttcccccgactccatgtctctatggaaaaggaatcccccattaacctctgaagcctctgtgtgccccagatctctctggaatactgtggctgaggaatcctgagccccatgtggctcagagccaaattacaggctgtgctcagatttctgtcccatgtcgggatcacttgccctgcagagaacactcttggccatgtggggttggaggaggagatctgtctacctggcaggtctgtatagctgcacatctaatgctgcattcttcaatcagctttgccagaatgaaggtgacatcttgccacccataagtagggctactgcttgtccctcctaatggatgcctaaaaggaatgttatgttttgaaaccccaaaagccccaatatgtaagttttcctatgtgtcagagacttctagcaagaccttttaccccaggaaaagccgtaaagtgctttgctagaagtaaagcactttgtggcttttcctgggggacccatggagcaccacaattttgtttctcagaagaaaggagcctcgtgtgcagaggctagttagaatcttgtgagaagtcaggctctgagctttcccagctgagggtccagcattaaggccaaacctttctgtggctttctcgagggcgtatgggacaatgcaggggcttccaaatcattctcctgagaaatgttatgcaggggctgcaggagacctctgtttctttctttttttttttttgttattattatactttaagttttagggtacatgtgcacaatgtgcaggttagttgcatatgtatacgtgtgccatgctggtgtgctgcatgcattaactcgtcatttagcattaggtatatctcctaatgctatccctcccccctccccccaccccacaacagtccccagagtgtgatgttccccttcctgtgtccatgtgttctcattgttcaattcccacctatgagtgagaataaatcctgcctctctggtctctggctggagccagaaagaattctaccctccttctccttccctcctgcttgccctaggggatcctgaatcaaaggggacctcacacctggcttgttcttatcttgattggtgccctaagctttcccccttggtattttcagagtgagggctcaggttaatctgaaagtcctactggagaccacccacctcccttaagcaagcagcttacctttcagcctagcgcctcctgtgcctgggatgtttgacaggcatgctcacactgaaagtggctgataagccctgggagctgtggctctttcacagatgttggagccagaaagctcactggcagagtccttcctctgaatggcatcattttgtccattggcctgggacagggcagtgaaggtcaaaggtgagacaatgtggcagaggggacaagcactgtggtcccctggctagaagatggacatgggaggctagaaagctcgtgacctcccgacaaagcttcacaggatctcacccacattgcccaaatatatggctctggggcaaggatttagggggtgaagatcagaaagaactcagagtttggtttgcaaatcttcaggcgcttctcctggtgtcctctaaagaggaagtcaccacctcaggctaagaatggcatgtgcagagccccacctgaagtcactttcctgtgtttgtcgctctgttgtctcatcttcgtccctgtagggaacctgtaggaaaagccttaaattgagagtgaccctgggcttattaacagcagaaagtagggaatgatgataccaagggacaggatgagagagaaggccacactaggaagaagatgaagctgttcaaagtgtagggtctcaggcaggagaaccagggggttcaggtgcctgcaggtctgtgaagagctgtttcagttaaacattctactccaaaacttagtggcttgaagaaacaacttatgattatttctcctggttatgttttgtattgactgggctcagctgggtggtttgtgttaagagtcctcatgcagttgcagtcatagggtgcctgggctacagtatgtgagggctctgctaggcaagacacagatggctgctgatgctggcctttggctggatactcaactggcatgtcaacacctatctgtggtctctcagtgtggcttgggcttcccacaacgtggaagcaagaggcccagagaacatcccaagggtgagctggcaagaggcccaggtggaagctataaggcttctttcaactcagcctcagatgtcctagaatgttacttccatcgcactgtattagccaggaagttaatgaggtcagcccatttttaagggggcaaagattagatgccacctcttgacgtgaggagttagttgtgcatgcacaggagaggcaaggacaagagggcagcacctggcatctgtctcttgctggacttgccaggtagagtgtggaaggcagggttgagggttttcttcaggctctatctggtattgctgttggcagcagtgataatggtgaggctatttcccaaatgcacttcgcaaaacatttttcacatctacatgatttgccagcgagtaagcaagaggttagtgagaagcagaatattctttacctgcctgtgttaaaggtgaagagacaggcttgaagcagtcaagtgactttgctcacacgacacgagttttctgccatttgccccagctcaagcccacccatcctcgcaggtgacaccctccatgtattaatgtgccctgtcccaggctttgccagcatccccaagccctcttcatgcctctgggcaacagatctcctcctgggttctgacctggctctcttgctgtttgctgaatgcccagttaaatggcttcacttccatgtgactccgtttttccatccttagtgtggaattggagccaggactggggagcaaggaaaggagttggagaaagcaaaaccttcctgggtggtgcagagtgggctctgggaatggcctgggggcagacaagaaggccaattccagctggccccatggcctccttgctggctgtcactgggcagctccttttcaggccactggtccaaggggagcacaggtcaagggtgagctgctggtcagatccctagcccagggcaagcccggaggctgcagttatgtgtggaaccacaactgccccaatcttcagctgttgaaacatgaaaagtaatcctgttttgcctaaatgtactcaaatcattcaggagtgtgtgtgtgtgtgtgtgtgtgtgtgtgtgtgtgtgatatttaatgagtgagtggatattttaaaacaggtttcattaataaactgtacttaccatttcctgcccaagcccctaccctacctcctccaactctgaaccatctgggggtggtcttggctagtattacactcaacacaggtgacaaccatcggtaacactggctggagtcccttgaatgtgccagccagtctggaaactgtgggcccaaacaccagcaatgtccatggctgacccctgtctcactgtcacatcctggtactgttatggagccctggccctcaaactcagggagcacactggtcacttccgtgaaaagccacacggtgcccctgatggggttaaagtgcttcatccacggagtgagcttgtgtgtcttacaaaagggctgggcatgggggtaagaatggaatttcaccccaaggatcaagctctgtttcgaccctgatataagaggaggaggaggaggaggagaaaactgacaccatacagaagaattaaacccctgacacatgatttccctcccctggatggcagcccaggaagtgctgccccctgttgccagcctagacactatttgcagcttctgccctgggccaccagtcataaaatataaagtacacagagccctaagtcaacaccagggagagtcaccgcacaaggtgggctccagtatggcctgggggtttgctggcatggattccttgagcccctgccctttctagatctttcccaggttccctcggggaagcctcaccatgcctgggatgggcagcagcaggacatttcagaggtccggggtggagaaagggagactcagccaggaaacacatggcagggccctggtcattgcccatatcactgggtactgccagggaaactagcagtcagcagcaggcaaccccaggaggctccagggctccgtgcctggaagagctgtttggaacctctctgacttccgtgggcaagagtaaagtggggagaggttggtatccttggtatccacatctggcagaactactaaagccagtgagggccgggggcagaggtgacactctcctcttgctccaatccagagaagtggtccctgtgtctgcagagagggtggcctcatatggcttcttgagttaatgtttcatgtatttctgtgtgataaactaccccaaaacttagacactcaaaataatttatcatgctctttcacaatcctgagggtttacgggactcagcaatcagatgtcacctaggactagagtcattcgaaatctcgcctaggctggacactcaagacagcattttctctctcatgccaagtgcccagactgagatggctggccaacttggctggctgggaatctttctctacagatgacctctttgtgtgggtagcctgagcttcctcacatcatggtggcttcagaagagttgtacttcttatctgatgtcatgcttattgtggattaaatgaggatgtgaatattgggaaacatggttcattagggagccatctttagagaccagcttccacaggtagaaagagaggggctaatattggggtgatctggagacctttacttctccttgttaaactcactgtggagccaaaatggccaatggggctcatctggttcactacttcagactgttaagcatggcctcccagtgccctgagggttctggggtcatgtccaggcagaccccctggtccctgcagcggtttgcttgccatcaatatatcctgaaatgctcctcagacaacttggtcccttgtttccatgtgtcctgctatcctattgtcaaagcaactacccaatcctgggaagtcttattattaattgtctttttttattatagccatcctagttcttggttctttatttcctgtatccatttcttttctattgttttcactgtctctagcctctctttgctccaacccctggggcacaggattgccaaggtaattatcatcagatgtagatcttaacctaatattctcctatagaggaacttggagtagacatgaaaattctccgatgagaagttcagggaaaagaaaatacatcaggtccatatgaagtcacagtcatttctctttgtttgatccttaagtgcatagattgcttctttgagttttttggtgtcatatatatacaattcacacattcatgaaattcattcttttagtgtgcaattcagtggttcatagtatgtttacaatgttctacaagtatcattcctatataattccagaatatttttatcacctcagaatgaaaccccatacccattagcattcactctccattgccccctccccactccactgacaatctaatctatttttgtctctatggaattgcttattctggacattttctataagtggaattctgcaatatgaggccttttgtgcctggatgtcttcacttggtgtactattttcaaggttcatccatgttgtaatatgtatcagtacctcattatttttatagctgaatattttattgtatggatataccacgtttttaatccattcatctattgatgcatacttggtttgtttccactttttggctgttctgaataatgctattatgtctatccatattcaaatttttgtgtgcacatatgttgtcatttctcttgactgtatgcctaggaatagcattgctgagtcatggggtaattctatgtttaatattttgagggactgctggactgttttccaaaaagcctgcaccatttcatattcccacaacagtgtatgagggttccattttctcatgtgctcaccaacactttctattatctgtctttttaattatagccctcttggtggatgtgagcagtatcatattatgggctttattgcataaaaaaggctaatgaaaagatacaagtatcaggtggtccaagtgtaaacaaccttgagattatgaaggcagagttgcaatctaaatgcctaacgggaagagttcccgacccttctgcatcataaagtaaaaagagtctagatgggacagaaccctctgtgagggctcagaatcaggcctagcagactcctttctaattcttataacatgggcttccttcaagaaagctggagtcccatcccttttagtagagccgactgaccgctgctgtcatcaccatgaacaggacctggtccaccaagaacttgacatgatgcagatgtgggacctcactcacacacatgaacccagcaggccaaggcaggacattgtgtgaagaggaccagcagcatgagagcattgaccttgaggaaagtgctcaggcccctctcaggctcagctgacccatttcaaaggcgaacaggtgggattgctattctactctactgcttttgaaagaagaaaatcaacagcccctgcctctatttgttgcctagggcaaacataacaaagtaccacagactgacggctaaccgacagaaacggatgctctcgcagttcaggaagacagaagtccaaaatcaaggcatcagcagggccatgctttctctcctcatttcttgtggttcccagtgatccttggccttccttggtgtgcagctgtgtaactccagtctctgtctccatcaccacaaggctgtcttccctctgtgtgtctgtgtcttcacgtggctttctcctctgtgtgtgggtctgtgtatgcttctcctcttataagaacattcaacatattggattaggggcccacttcacttcagcatgacctcattttaatttataacttaactatatatgcaaaggctttatttccaaaaaggtcacattcacaggtaccaggggtcaggacctcaacatatctttcagggggacacaattcaatccacagaactgcccatggctcgatcttttttgccatattctatacactgcttctcggtccatcaggaatgtctttcttcttttctattcccccaccctccaccacacttccccttaggcctctaccattccttccagcttctattatcctagtgcctctctctatgccctgatgacaaaagctgtagagttagccactgcattgtacctggcagtaagttgtacctttctccacctgaagttaagaaacttggatagtctctcctactaactttagcttcagaaagcatgaagtccttccctgtgcttgccctggattcttccgcagatggagggatgcagagttgcctgcagaaaggtgtgtgcctggttctgtagtctgtataaagcagcatgctgtgcaaatcagcagcatttagaaagctctcagcatctcctgagaacttgtcaataacacagattttcagcccctagatcagacctactgaatcagaaactctaggtggaccctggcattctatgttctgacaagtcctccaagtgattctgattcatgctgaagactgagagccactggcatagacaagtgctttagatctcttggagaggctgataagtcagaaggcagtaaataaattgccaaatgtttagcctgcaagtgatgaagtgagaccaaaatgtgtgtctggctgacctgacaaaagctgtccatggggctgctagctcctgggcaagggacaaagcaagtctttaacaactgaggggaattggtggcctggctccatcatgctgccccagtgaaactctgcagagtgaaaaaataaaataaaaggagtagaaaagtaaaaatcacatatgaggaaactagaaaacaggtacatttgagccacaattggtgaggaagcatgcatggccttccaaaggcaagctgcacaaactgaggggtctaaggccagactccccctttagaatgacactgggggacacgggagggttctttatgcagcacagcatgtagagggtagggaagcagggcaaaatgatagaacatggggaagcatgtggacatgcatctttgcaaaaatgtggataccagcatgggggccaaaacagggaaggcaaaccagcagacttaccattctgatcgtggtaactagaaggaaaggaaacatgaactcctaaagatgtgcatagagatatagaaataaaccaattttctgcatacatccatgtattaggggcttcactctaagcttggaagatctcatgacttggcaacatcagattttcagggaagaatgtagatggaaatacattcacagacaacagggcagaaccaagctgcctacttatctgctattctttaacacttagcaagggttaaagactcccttccaagataagtagtgatcaacaagaagccagcatgatatctatggaaggtattgaggaacatgaaaaggaaaagagtaaagacaaagggcagatgagaaacacatacctggagcatgatgacatccaacacatgaaattagaccccaaagccaagaaatcaataaaattagaggaaatgtcatcactctgaaatgagagctcaaagaagaggtatgagaacttgaagaagagatgataagataactaagaagatttaaaaaatgaatctgtagcaataacattaaaaactgtatagaaagaacagctacatgacagtcatcaaaaaagagaccagatactgttgagtaaataggcagtgagaaaaaggacagaattgagaaaatgaagcacaatgaagtggaaaaaagtaaagagctaatacagataagaagaaagtgtatacatatgtaacaaatcttcacgttgtgcacatgtaccctaaaacttaaagtataataataataaaataaaataaataaataaaaaaagaagaaagtgagatttgaaagacagacaaatgctgtctcaagtacaaatagttgatttttctgaagacaatagcagaaaacacagaattgaaaaataaagatatagtagaagaaactatcctcgtgtaaagaaagatctaaatttacccaaaatttcatgacccagaaaaatggtcatagcacaacaaaatatgagtgatattctgatggagatactttaattaaaatgtaaaaaagtcccaactcattggccatctaggtttaaaaacaatcaactgaattgcaaaagaagaaagtttctgatagtggcttgcagttttcacaacagaatcattcaaagttagaagacaatgtggtaatcttaatcttcagagaagaaaacattatttaagtttaagcaagtaaagctgtcattttaagagtaaatggtaggctgggtatggtggctcatgcctgtaatcccagcactttgggaggccaaggcaggtggaacatttgagcttaggagttcaagaccagcctgggcaaaccccagtctttgtggtaaaaccccatctctacccaaaatacaaaaacttagcacggcatggtgtcatgcatctgtggtcccagatacttgggaggctgaggagggagaattgcttgaacccaggagcaaaggttgcagtgagctgagatctcactactgcactccaggctgcgcaagagtgagactccattccaaaataaaaaaaaaaagattaaataataataatggtaataatcaattttactgaaagccagaccctttttaagtgcctggcatgtgcaagcgtgtgccagagagaaaggggatgaaatactgttttctgctgtcatcctactacctcaatcagagtgactctacaacattccacaggcatgttctcctgataggaggcatgtgtgtttgtgtgtgtaggggtggtggctggggctggttgttaaaaatcacttgaccagctgcgacaaaaataaggaccacagtaatgagtcatggctcccatttagcaactaaaacagaattaaccttttctttaaacaaaacaaactctttttattataaaataatactcatatagacaatttagaaaatatagaaaataaagaggaaaataatagttgctagtagtataactttaacaaagaataatttcttttttttcagtgcagcctcttttatttttacatagttgttcccaaataaatatagtttttatgttgcatgtcacatttaatatttttgtatcattggcattttttatgtcttcatacattttatattcatagcctaataatatcccttatatggaatacatgtacacctagctgggggcataaaggttatttctatgtgctggcaggagaagggtttggcttctgctgacaactcttataaatagcagtgcagggcataaagcctttggaaggtggattgcttcttggaataaattctcatgagtgaaaataattagttgcaagatacatctgggcctgacacagaatgccaaattattttttggaaggttcatgatggttcacactttcaccctcaagacagggagaaccagttcattacaccccgctcatcccttgagtattcttccagaggagaaaaatgactctgcaagaggcttttaattttttgtttcattgattgctagtgaggctaaaccttcattgcgtgttctgcaactgagtaaatgatctgcttctactgtggcctgtgcatccacttcctggctccgagccctgttttacttcctcccagtcttcagctctccagccagatgccacccatcccagccccagtctgggtcagtgctctgagcacacccatccccacccagctgggagactcctgcattgagatctgtcctccactacagcacgacctcctgagagcagggagacacacagggtagacacatcgtctgtgctcagtgctgaaccaatctgtgtcttcctcccagtgctatctgatgagactgcctttgaactgttatttccatcttgaggtcttgacttctaggctctgatcctagaactgtggctgccaccagctacagaagtcaccccaaatgtcttccatttcttaataaagtcatctttctgggcctcaggaatctcaaatcccttctgtagagcctcccagcacagggctgctaagagttaattaatccacttgggaagccagtctgccctggcagggttcagtccatggagacgatcacatttatcgtttagttaaaggcttcatttagcccctgccctgaggtgcgcacagagacattttcttgggcaaacttaattattgcatcagaagaaaaaacatgttctcatgttagttttggggagggagcaagcgccagcaagacttcctgtaattttcattaccagtaatgacattttccacaatcctgaattcattgggttattttaattctttttatattctttgtctaaatggtgaaggaatctatcaaggggaggcatgatatcacttttcataaactcaagaagttgtagggtattttgaaaatcacctaatccatgcctccaccttcatacagcagaaccatagctaaatcctctgacagctagaaacctcctgaatcagtcaagatttctagagaaatgacttccacagtctccctgaacaagctgttctgtggtttggaaactcagaatcaggaaggtctccccaggtctgataattgtcctttgcaatagcagtgacagtgtaaggctcccttttatgggccgcagcgttctcaacctgggtgcacgtggaaatcactgggaaaatttgaaggtcctgatgtccaggtcacacccagaccaattagatcacctgccttggggagggagcagaaacctgtcttttcaatgtccctaccctgggggatgctgatgtggagccagagtggagaccctggctccatttctgcttatttgtcaaatgtctcacctgcaagggacattaatgtccacctggttcatggttcccagccctgcctgaacagcagaatcacctgggaaggttaaacaacctattggtgcagggaccccacccccactggtcctgactgaattgatctagggcctggctactttttgagagctccccagggctctctgtccaagtgaggaaggtggccaggtctgctaccttgtgtgagaggagctaaggcagactccaagagaccttcccacatgcaaatgcattcattttgcaagggcattaagagtccctgagttctgctgtcaggccaacggcgcctctaggacccagcggccactccatgtgggttactcagaaagatgatttcttatcatttggtgcctgagaaggtcctaacccctgcaacctgtgaatatgaatttctaggcaaaaacaatgtattccagatgtgattaggttaaggagtttgataagggggattatcctgtagtaaccaggtatgccctaaatgcatcacaaatgtctttataagagaggcagagggaggctgaaaacagacagaaaagaagtgatgtgaccatggagatggagaatggagtgatgcggccacaagccgaggaatgctggcagccaccagaagctcagccaggcaaggaccttgggaccctggaaggagcattccccagcttgttaactgtagagggtatcgactgcaagttgtctaggttcttggtgttttgaacaaagaattgaacaaaacacacagcaaagcaaggaaagactgaagcagcaaaagtagaaatttattgaaaatgaaagtacatgccacagggtgggagtgggccagagcagcagctcaagggcctcggttacagtatcttccggggtccaaatatcccctagaggtttcccattggccacttggtgttcaccccatgtaaatgaagtggtggccggcaatcagtctaattgttttggaaagcaaccagaggctgaagttacaaacttactctatgcaaacatctgattgtctgctgcaaccaatcagaggtactttcaattatctatctgcctcaaataatgacagctttgattattgctttccaatctctcttttatttcttttttcttcttattgcactgcctaagccctttaatgcattacagcattgaaaagataaaagaaggcattcttgccacttttctgatattaaagggaatatcttaaacacttttacatgtgatttgccataggttttgtttctttattaagtcatgagtggatgttgaattttatcaaacagatctttgcatctataaacctgagcatggactttctcccttcgatctgttgatatgacacattacattaattgattttcaaaattaaacatctcactgacattctggtggcttcctgaccttgctgccttttatggctcttcgggcttctaccctttttttctgttcccatgggagtatctttggaagagagtggccctgctcacaccagaactagacattacatttttcatgactccaacagtgcacttgcaattgggcttatgtggatggacagggctagattccttccatcatgctgccttgctcgactgtccgatcttgggacatttgacagcaagcctctcgggtcaccctcaaatcatctttctcccagactttctgacagttcaccttattgtctttggccttgagacctctctcttcatcattctcctgcatccctgattctctaggacctcagtcctggggaccaggctttcgcctggccaaagagcacatcctcccctctgctcccctccctgcagtgctggcccttctggctgtgctgtgagactggccacaatgtctaatgggagcccccatttctgggcctcctgctgctcagcttggtctttcagagagcacccctcaaaacccagagcaccagatggcagccacccccaggtctccacgtcacctatgagaagcgttcaggcccagcacacggcctggccccggagtggtgcttaagaaatgtttgttggttcttgctctttcttatagctgagcctgggtctagggatgccctccctggccaggcatggctaagaggtggggtgaggggcttcatgggttcgcctgtgtcccctgcagcacccctcactgcaggctcaagcttaccaggacccccactactgactaaacacacatgttggatcctactattaaaagcagtgagaatttaatccttcagagttcagctcaagcatccttttctcagaagactccctaacctcctagactaggtcactgggtcagtcagagtccctgcgggaaacagatggtatatttaaattgggtaatttgatcagagttcaatgaggggactgtctacaaagtgtgactggtttaggtgaagcccctggggtggggtggtcctctaagccagtggagctaccttaagtgggacctgatggagtgggggcaggagtgattctcagaaccttgtgcagcatgggggctgggcgggaactgggcctgctgcagagaatgcagcgggcagggagtcagaaaaccagtgcccacattcctccctggctgcctccagcctctggtctccagctggccctcctatcaggtgaatgcagctggaaggcacgggccagcctgtagggaggctctgcacactgcacatgtgtgcgattgtgtgattgtgtgtctgccccatgagagtgtgagctccacgaggaaggaaatgtgcacatctcactcacagcacagcatctggcacattaccagggctcactaaaagtccgctgactggtgcagaggtgtaatcaatggactgtcctggaagacattactgaggaacccaagagggactcatcacccctcattcccttgaatacagtgcccttactgttttctcttgtctcttcatggaacttgggaggtcctagatgaaaggtctcaagggcaactcccacctcatcttcaactccatggctagagcatgctctccccagcatggctaggggccttcagcgtggcttgacatcctccgaacacgtgactgctctcctgagatgtgtgggtgtctcctctgctctcatgctccaacttccccatgtgccttgctatggactgaatgtctgtgttcccccaaatccatatgttgaagccccaagccccagggtgatattatgggaggtggtgcctttagaaggtaattacggttagatggggtcatgaaggtggtgcctccatgatgggattagtccttacgaggggatgaagagaccagagctttctttcccacatgtgaggacacagtgagaagtcggctacctgtgagccaggaagagagtcctcaccagggacccaccatgctggctggcaccttaatccccaacacccaacctccagaactgtgagaaatacatgtcttgttttagcctgtagccccttggtgtatggtattttgcagtgaagacatctcctggaagcttctttcagaccccccagcttccctgtctctggcccttgacaccactcttgaacttccctcctgtcctacatgtggtatctaaggaggagtcactgtcccttccgaatgctgaaaggccctgaatggtcgggagtggctctggcttccaaaaagtgaaagttagtcctagaatgacaggtgtgggctagagggaacagcccctccaccttcaggacaagtgggggcgctggccttccaaagattctcttcaggtgcagaggacaggctcatgtgaagcagctgctggctctttcccttggtctgcacgaggtgcatcctgccctgggctggcctgaaactgagcgctggggatgtggagggaacagccttgaggggttcatgtctggtcaccaaagagacaaaaaacaagctgacaggataggatgggggtgtgcagatggccaggcctcagggaggaaggagtcatgaggaggtctgcagcatgggcgggtaccgggactcagagggaacctgagcaaaggggaggacatgagctgagtctaaggggaccccaggccattttccacatgcagggaagatgtcggcagaagccctgaagagaagctgtgcctgctgagaaccatcagacacaaggtagacccatacagggctcactcaagggcatggtgaccttgaggccccagcttcaggtaggtaagttgcctgcattcttctgtcatccccgactcctctcatttgactaggtgtgagtgatagcatcagtgtctccgaactcaggagatatcacctggccacacatcaaagtcatgtagggagctctgtgaaaagacactggttttagggctcctcctcctgagataaatattgactgggctgggcaggggctgggagatttgacagtttttaaacctcctgcagctatttgagtgtgtagctgggatttagaaccactcgtccaaggaatgtctgcagaggcaggcaagctctttctctgcgtgtcccagcctattagctgccaaagatgattccaaagtccattctttccactttaaaatacaagatgctgtttgatagatctcattttatgtttttcaaagcaatgggtttttttttttttttttttttcagaattgaatgactgtggtgtttggggagaaataaaggctgagtgccagcttttcttcctcctcttggaactggtgcatcagcttgtggaagcatgtggagcttctgtggggtcctggggcatggacaagtgggaatcagtcagctgatagttcagtagggtgtagggagtgaagctttgactgcacccaggagagctgtagaaaaaagtcaccatgagatattaaatgtcatcactttcagattattcattatatatatataggaataattttaaaagccacttgagagatcaactgaagaggtgtggacagagttttatgcacagagatacacatattgaaaaccaccaactttttcagtaaaaagagaaagctgctgtgccagatgacagaatccagcggagaaaaaaatttaatgacagggagatcatggtataatgctaaaccaaagaaacatataagcctacacataaagtagcatctcaatcatgtaaaattcaagaattaggccataatttttaagtattttcaaatactgcagcctttcaattatcagttaatggtattacatatgagttattatttctttcttatttattagtatttttaaagattttctgtaataagagtgcattattttcataatcagaaaaaaattataacaaaaatatcataacaagtcagttaagtggcaagtggccaactggaggaagggtttccacatttagcaaataaaaagatagaatgttcattgcatttgaattttggataaatgacaaataaatgtttagtataagtatatcccaaatattgcctaagctatacttatgttaaaaaagtatttgttacatctctgaaattctaatttaattatgtatttctttaatttatctgataaccctacctggaggggaaggagaacaggcccaggccatgtgggagatttcaagccatcctgagagctccccggctgcccaagacacaggctttggctgggcttccctatgtcaagcgatggaaggcaccatctatgcagcagccatgctctctcctgagtcctcagatcaaatatcttcttatttctggacttaagtacagctgctccagcatatacacctacttcatgcaaatgataacaataatatttatttgtgttgcatgctaacattctcagtgggcatcatattactaatcacatgtgtggatttttatctctgatgggtcacccagcaagtgtcagatcttaacacagctcctctaagacagggtctattcttagtcccattttgtggctgaggaaaccaatgctcagagaggacagaagcttgctggaggccacacatctgcagggtctggtctcagatcccactgccctgcccccactgagcctggtgcaggaaagctcttctctgtgctgtgctctgtcactgtaatcttggaagcagccctgggagatggcagccctgggagatgcctaccataggaaagctaagtcccctctccccctcccccgaccccagcaggatcccattggtttcttctgatctttctccctccctctctgccatgaaggtttttggaatctgctgggtctgctagatcctctcactatctctgaacctcagacaaatcaccagagctgccagtgcatcaatactctcacctaatccagaaacatgaacttggctctcagtgcaaacacccttcccaccaggttgcagcattcccaggtgacttttaagtgggttacagtgaaagtttcttcaaaagcatctctttccctgctatccagggctttaactgctgattgatgatttataatataacaaacagaaaaattttttttatggttgaatttctggcttcagctcttatcaatcttatattgtctagaaaaaaccaagatcgtgacttctgaggaaaatccccacatacatctcattgtacttattccttggtgaaatccttaaactgaagtcttgttgtgaatacattgtttctaatttttcttatttctttgagtcccttcaaggcctctcaccaaaccaaatcctaaagctttcttggaaatccagaaaattaagtgaaacaagaacactgtagaatatattaaatggtctggcacaaattaatgaaaagctctttgcttgtaaaagaaaataaagattcagttcactcaaacaaggaaagctctgtggggaaagcccacattttccacttggcttcagcacctccaagtgcagtgagtggtgagtgagcagctcagtgtgagcatgccactgtctacacgggtggcatgaggaagaagagtggcccagcacaaggcagggtctctcaacaacggtaacagatagagaacaccgtgttcattttctgcatgaggagatggatcctcccatgcacagaggggtccagcaacatgcccagagtctcccagctagtaaatcatgaggctggacccgaccccagaccctgagctttccagcacatggctctgcctccctcatgggccaacgtctccaaagtctaaggaaggatcaatcctttaaagtcagaatgtgctgcagttcagaggtttatgaacctggggttggctctgaaccatctccagggcctgactttgggctgccctggaagctttcttggcaccttcggtcatcattgggctagcccccatcattcctatctccctctgaactgattctcttttccagcttcagcatgagggagaatgccaaggtcatatagaccatggccaacaagtaaactgtgaagatttgtcccctttacggtgtggtgacgtagaacaagttatttgacctccaggactcagtctcctcgtctgcaaagtgagtatactaacgatcacttccaggactgttgcaaagatttatgagacactgaagatgttcagtaaccttgtccatcctccagctctttgcaggttcaaatgtttcggataaaccagaccctgaatgagtaggagaaggaacatgtgaagaaagccaggggcccacaacatccctctctttgcacaaggtaatgcagttctactcctaaaaatcatcctccaataaaactgtatctagggtagaaccttgactaatgatacttggtatctctctgtggtcaatgataggactaagttggacatgagagatgctattctcagaattaagggtcagggaatacaatgtggtgactgcaacctggtgctcagctacccattaagaagctctttaaaaagtaaagtcgtggtgacattcagggatggtagtgtggccagttcaggtgacagacactcaaagctctatgtggaatagtggaggagcctcaaactgttccctggccccgtccagaaggaaatgcccatgccaggcgccttgggcatggtgttcttgcctctcgcctggctccccatccaatctgcaccctctgccaaggattgaagtcatggccacctccacttccaacgcccgctctgtggctgtgccaggagttgggcattagctccctttcacttatttgtacaggatgaattatgccagggtcgtgttaaccatcatttggagattatttttggagacagaaaactctttagcagcaagcgcaggaggttatacaacgactgtgcaagggagactcttggatactcaaaatagaccttccaaggtgaggtcatcatcaaatggcactctggggacagagtttatggactcacctttggaatactgtgtggtgagcgtgccgtcgccccagccaagagcagggcctgctctaatgcagccgggctcgccctcatttatgttgggatggtgctcagtgtggattgatggaaagaggtggagcaggatccagaaacatccactacctcactcatgttatctcatcgcacaagggatccagtgttagggagacccagggcctggccctggacatttcacatgtccagttcttttttaaccctttgctacaatgtgctgtttggtccgtggatcctgtagctggttcccacatgcttgtgtttttctgtcttcatgatgagaactgtagctctagatctttgaagcttgattttgcttgggcacccactgcatgagagcactgcatcataggaaatgttgctaagttccaaatatccccaagagagcttcccttacaaactgcagaataggactttgctcttttcaaccattaatgaggtctaaaatttgaaaggccagccagtgaatagctaatgtttttgactgaattcaccccataagaattatattgtatgtctgtattagtcagctagggctgtcataacaaactgccacagacttggttgctgaaaacaacaaaaaattaattatcccagttctggaaatgagaagtccaagatcaaggtgccagcagagttggttttttcccaaagcctctctgcttggcttgtagatcccatcttctcacttcctcacatggtctttcctctgtgtgtccatgtctgtgtcccagtctcctcttcttataaggacaccagtcatattgattagcatccactccaaggacctcattttaacttcatcacctctttaaagaccttgcctccaaatacggtcccattctgaggttctgggcggcagggcttccactatgaatttggaggggagtacaacccagcccataacaatctcaacactcagtacataaagataactaacaaaggccgggtgtggtggctcatgactgtaatcccggcactttcggagatcgaggcaggtggatcacctgaggtcagaagtttgagaccagcctggtcaacatggtgaaaccctctctaataaacatgtaaaaattagccaggtgtggtggtgcgtgcctgtaatcccagctacttgggaggctgaggcaggacaatcgcctgaacctgggagacagaggttgcagtgagtcaagatcatgccactggactaaagcctgggcaaccgagggagaccctgtctcaaaaacaataataataatgataacaataataataataatgagatgtgagttaaaaaaaaaaaaaaacagaacaaaacagtacttacctgatatggtttggctggtgcccccacccaaatctcaagttgaattgtatatcccagaattcccatgtgttgtgggagggacccggggggaggtaattgaatcatggggctggtctttcctgtgctattcctgtgagagtgaataagtcacgagatctgatggcttcatcaggggtttccgcgtttgcttcctcatcattttttcttgctgctgccgtgtaagaattgcctttcacctcccaccatgattctgaggcttccctggccatgtggaactgtaagtccaattaaacccctttttcttcccagtctcaggtatgtctttgtcagcagaaacaaaacgggctaatacattacctttacgatgtgggagaccatttgatctttgctattctattctatttctttaaaataaccctggttatgacccacaaaaatgatttcacaatccattaatggttacaacccacagtttttccagatcaaggccaaaccctgagaatacttatttccactctaatctaaggagctaagcaaatactaatcagaatcaaagcctttatcttaatgatgggggagctgagaccatggataggcttgagcaggcctggtcagggaatggtggttacaacagtggccccagtctggggaccaggggtttgagtttcttccagaaagaaggatggccagacaggatcaggatggagggggagtgagaactgtgtctgagacacaatgccaggggacaaaaccaggggaccattcaaagagcaagtgcagggcagagaaaagaaggagctgccaaaaaggccagactcagggcaggggcagggacagagggacgagctacagccacgtggctgcaagcaccctaaaggtcagagctcatctatgttggggatggtgttggcacaggctcggtccctgagtgctgtaggctataaaacaagtgttgcccttttaggtccacttcatctcgttagccttttccatagaacacgggggagctctggctgagtccatgtgacaggacatctcacaacagaggggccctgacactttacacttgaaaagtttggggaagccaaggagaggagtctttagctacggaaaatcaccagagaaagccaagctgcagagaaagccatttctaaaattctaaaatagtcatcccagcattatgccaattaccttcctaaaacacaggtgccatacacccaatcccttgattatgtgaacacatactgtttcctgatggagtatatagttattgctttagaacagagtaaaaattctttaacgtggaatttaagccctaaggattttttatatcatcctccaacttaaatccttccagcttcttaatttgtcatttatacccccctgccacttcccactgtatatacatattttaacattatggtaataataccagagatatggtgctctgctttttaaaaatagcataaaataatttcaaacaatatcatacataaaaagaatttaaactgtttttaataataagaattgcaaagtaatataatataaaaagagcccaaaaagagtatatgtacagctgaaacaagaaaaatccaatagacatcataaagccaccacctggcttaagaaacagaccttttcaaatgtactagaaacccataatgtccccttcctcaattatactgcacctactccctgcaagtgactgtcatcctgaataatgtcttcatcatctgttgcttttctgtgtcattttcaacacagtatcaaaccttaaaaaatcatattttgtaaattcaagttgctgatgttcagaaatgcaatgtgactttcgtgttttgaattaaaaaaaaatcaactagtaaatttgtctattagttctaaaaaattatctgtgggttctttggggttttctatatagaaaatcttaacatctacaaataatgacgctttgtttattgctttccaatctctctttatttctgttttcttcttactgcactggttaagccctttaatacattactgagcaggaaagagaaaagcagtcattcttgccattttatgatcttaaagggaatgtcttaaacatctttacatgtgatttgctgtaggttttgttaggtgctctttattaagttaaggaagttcctcccattcttgttttgttacaagttttgttttgttttaagtcatgagtggatgttgaattttgtcaaacagatctctgcatctgtaaacctgagcatggactttgtgccttcgatctgttgatgtgatgtgttacactaattaattttcaaaattaaacaactttgtattcctgggataatctcaaagtgattacgatgtatgattatacattttcctttgtgtgttctttatggcagttttgtttagatgtcttcacctttatttataaagaaacttaatctgtagctttactttcttgcagttactcatctgttcttagtatcagacatgtgatagcctcatacaatgagttaggatgtgctttcgctttttctattctttggaagagtgtgtgtaagataaaactatttgatctttgatgtttgatagaaatcaactgtaaggccacttgggtctggggtttcctttgcgaaagaattttaacaactaatgaggcctcctacatcttcctgaaataattttagtaaggtttttttagatatgtatctttctcatcatctgttgctatgacattgttcataacatctctttattactagttcacagcaatttttttgtcctttccttttgtgccttattttggatggagtgctttaaaatcagattccactattatccctctacgtgttttacaaatataattgtctattctattagcgattatcttagctatttcagtatgcgtgtttaagaatgcctaaagcttatcaatatctatggtcatctcaactgatacacttgatatacttcatttcaaggtttattgctttccacaagcggatgtactgtgaagctaatgaaacatgagtttttcagaatgcttcatttacatgagctctttctaatctgctgagcctaattttgctttttaaaatttggtatttttgttaacaaggcacattttgtgcatttacagtctcacagaacctggattgacccctgatatttgcaaatcattctgtggatttctaacttctgtgccagctcagcattatatttaaaaatatattatttgtggctggaagcggtggctcacacctgtaattccagcactctgggaggctgaggtggtcagatcacctgaggttaggagtttgagaccagcctggccaaaatggccaacctgtctctactaaaaatacaaaaaatacacaggcttggtggcagacgcctgtaatcccagctactcaggagggggaggcatgagaatcatttgaacctgggaggggaaggctgccctgaactgagatagtgccactgcactccagccttggcaaaagagtgagccctcatcaaaaaaaaaaaaaaaaaaaaaaaagaaagaaagaaagagagaaagagaaagaaaagaaaaaagaaaaaagtgataatttgtattgtatctgttgtttcatttgtctcagcagatctaagcgacctcactgctgtggcagggactgagatcatgaaacttgttacttgactgcaaacatggccatttcttatagaaaaattaagatatcaaatagtggatcccaaagcttttgaggacaatgaattatggagtcagttctagggaatagaaccagtttctaatcagggacattctcttatcccagagcagggggttctgctggagcccaggtagatttcagtagttgtaatgtacctccctttcatctccttctgggtggaagtgtctatttagttattcttctatctctgtctcatgattgtattctgaattaggaatgaggggcaaataatttcttttttcagtttttaggtctctgtgcctgacttagatgacaagatcctgaactttaaagagcttgatgttataatgagatgaaacttttgggtctaggggtgagaacactttgccagatgaccgtgctttgggctcaggaaagcccttgaccagagcctggttctgcttcctgggtccacagtctgctctcggaggcacctggagccactcctagtttttgctctgcatcaaaagctagtggggatatttctggaaagagaagtccatcctgggcttttttttttcctgaacattaaatatagacattaagtataagcactaaataaaataaataaaaataaatattaaatataaataaatataataacaatattttccaaggtgttaattcattttaaaacaactgaataaagtatcttttggtggctgctagagttaattaagttacctatttaatttcaaatattcatgcccctcttcatttaaataattattggagggggcttatgaaaattgatatgggttaaaaaagagtcagtggggctaagagagtagaaatagtaagatgaggcatgaaatatgctttctaagatcccacacacaaaaggatcttaaagtgtttctgggactccaagcaacccaccagaaaaggaaaacaggatcctgtgacatgaattacagtgtccttgatataaacaaactgtaacgactgcatactgcactttatgctgctgatacttgagacccacagccctgtcactgtatagggccagggacagcgtcctttaccaatatcctcacagagttagcaacggtgggtttcccagctgcctttgagtttgctttccatgtgtctgcactttaagcaggaagcacactttcatgaaaagagctccatgggaggggctctgagaacgaggtccatgctgctttggattaatccttcgccaaattctcaatgaataattttttctcaactttaaatgtgaggtgatgatgttttcaaggtttgactccctgatacttgcagtgaagctggtgttccttgcctttccatttgaaggatgacagaaaaatgcttagtcagagtgaatcccagattccatgctctgcagagagctggacagctgcttaaccaggacaccagcctgacagcaggtcatgctgcctgtcccacccctgcccagcatccagggctgacctctgtccactgcacaagaggcttctggagggccaagctcattcctgacttgctcactgtttgtattggtctgcaggggctgctgtaacaaagtgctgcaagctgagtggcttagagaacaaaatgcattggcttgaaattctggaggctggaagtctgaaatcacagtgtcatcagggctggttctaggccactctcctttgctggatggccattggcatattcacgtggacttctctcaactgtatggctgtctccaaatttccccttcttataaggacaccactcctcctattagattagggcccattctaattacctcatcacacctctgtaaagtctctatctccaaataaggtcacactctgaggttctgtgtgttaggatatcaacatatgaattttgggtgaacaccaaccttaacaccatcatagctccagttcctaacatagtaaaaaacaacaactgcacagcactaaaaaaaatttggagaattaatgtatgaagacataaattgaaatctattttatcaatagacagaatgtgttcaaggcccaagattttaatgttatagcaataattctgggctggaaaatttaaaatagatgttactaaatgctcatgttagtcataaaaggcttagcaaaattgagcagatgtaagttatgtgacttcctgaggaacactccaagataaacccattataaaaagtacctcttagcaaatgaatgagttgaacttgcacctacacagggtcattacccaaacatataggcacaccttggagatactacaggtttggttccacaccactgcaatagagtgaatatctcaataaggcaagttgtattcatccattttcatactgctatgaaggaatacccaagactgggtaatttataaagaaaaagaagtttaatggactcacagctccacatggctgaggaggcctcacaatcatggtggaaggcaaaggtggaacaaaggcacatcttacatgtcaacaggaaagagaatgtgtccaggggagctatcctttataaaaccatcagatctcatgagacttattcactatcatgagaacagcatgggaaaaccccatcccccaccccatgattcaattacttcccaccgggtccctcacatgaaacgtggggattatgggagctacaattcaagatgacatttgggaagagacacagctgaactatatcacaaatcacacaggttttttgtgtcccagtacatataaaagttataatttacagtatactgtagtctactaagtgtgcactgtctaaaaaacataccttaatttaaaaatactttgctgctaaaaatgttaacaatcatttgagccttcaatgaatcattatctttttgctgatggagggtctttcctcgatgttgatggctgctgactgatcaggttggtggttgctgaaggttgaggtggctgtatcaatttcttaagataacacatcagtgaagtttttagcgtcaattgagccttgtttcagtgaaagatttctctgtagcatgcagtgctgttggatagcatcttgcacacagaacttctttcagatttgaagtccatcctcacaaaccctgatttatcaaataagtttatgtaatattctaaatcctttgttgtcattccaatgatattcacagctacttcactaggagtagactgcatttcaagaaatcggtttctttgctcatccgtaagcaactgctccttcttttgagtttaatcaccaaaaatcagcaattcagccacatattcaggctctgcttctaattgtaggtctcttgctatttccaccacatctgcagttactttccctaccgaaatcttgaatctttcaaagttatccataaggtttgggatcaacttcttccaaattcccattaatgttgatattttgacctcctcccatgcatgatgaattctcttagtggcatctacgatgatgaatcctttcagaaggttttcaatgtatttttcccagacctatcagagtaataatcaactatggaagcaatggcctgacaaaatgtatttcttaagtagtaagacttgaaagttgaaattacttctcgattcttgggctgcagaaaggatgttgttttagcaggcatgaaaataacatttatctctttgtatacctccatcagagctcttgggtgaccaggtacattgccaatgagcagtaatatttggaaagaaaccttttttctgagcagtaggtctcaaaagtggacaacaaatattcagtaaaccatgctgtaaatagatgtgctgtcatctagacttttattattccatacatagaacacaggtagagatttagcataattcttaaggcctttagtatttttggaatgatcaatgagcattgtcttaaatttcatgtcaccagctgcattagtccctaacaagagagtcagcctgacctttgaagctttgaagccaggcattgacttctctctacctatgaaagttttagatgacgtcttcttccaatagaaggctgttttgtgtacattaaaaatctgttgtggccgggcgcagtgactcatgtctgtaatcccagcactctggggggccgaggcgggtggatcatgaggtcaggagttcgagaccagcctgactaacatggtgaaaccccgtctctgctaaaagtacaaaaattagctgggcatggtggctcacacctgtaatcccagctactcaggaggctgaggcaggagaatcccttgaacctgggaggcgggggttgcagtgagctgagatcatgccactgcactccagcctgggtgacagatcgagactccatctcaaaaaaaaaaaaatatctgttgtttagtgtagccaccttcatcaatgatcttagctagatcttctggaaaactggctgcagcttctccatcagcacttgctactttaccttgcactttatgttatgaagatggcttcttttaaacctgaagaaccaacctctgctagcctcaaaacatttattttgcagcttcctcatctctctcagactttgtagaattaaagaaaacctgggcctttctctgggttatgctttgacttaagggaatgttgtggctggtttgattatctatccagaccactaaaactttctccatatcagaaatcagactgttttgctttcttatcattcatgtgtttactggagtagcacttttaatttccttcaagaacttttgcttggcattcacagcttggctaactatttggcacaagagacctaacatttggcctattttggttttcaacatgccttcctcagtaagcttaatcatttctagcttttgattgaaagtgagagacgtgtgactcttcctttcacctgaacacttagagttcattgtagggttattaattggcctaattttaatattgttgtttcagggaataaagaggcctgaggagaaagaaatagacaggggaatggccagttggtggagcagtcagaacacaccatttatcaatggagtttgccgtcttgtgtgggcatggttcctggtgcctcaaaacaattacaatggtaacatcaaagatcactgaccacagatcaccaaaacagatgcaataattatgaaaatgttcaaaatattgtgagaattaccaaaatgtgacacagagacacgaagcgagcacttactgttggaagaatggcactgatagacttgcttgacccagggttgtcacagatcttcaatttgtaaaaacatgcaacacctgcaaagtgcaataaagtaaagagcacgaaaataaggtatgcttgtagttaacatgaaaggaaagcttccaaagtggtgacttgggtttgaaagggctggtcttgatctaacactaaggagacatccagtgaactatctggctacataacttttttattttattttattttattttattatactttaagttttagggtacatgtgcacaatgtgcaggttagttacatatgtatacatgtgccatgctggtgtgctgcacccattaactcgtcacttagcattaggtatatctcccaatgctgtccctcccccctccccccaccccacaacagtccccagagtgtgatgttccctttcctgtgtccatgtgttctcatcgttcaattcccacctatgagtgagaacatgcggtatttggttttttgtccttgcaatagtttactgagaaagatgatttccaatttcatccatgtccctacaaaggacatgaactcatcatttttatggctgcgtactatcccatggtgtatatgtgccacattttcttaatccagtctatcattgttggacatttgggttggttccaagtctttgctattgtgaataatgccgcaataaacatacgtgtgcatgtgtctttatagcagcatgatttataatcctttgggtatatacccagtaatgggatggctgggtcaaatggtatttctagttctagatccctgaggaatcgccacactgacttccacaagggtcgaactagtttacagtcccaccaactgtgtaaaagtgttcctatttctccacatcctctccagcacctgttgtttcctgactttttaatgatcgccattctaactggtgtgagatggtatctcattgtggttttgatttgcatttctctgatggccagtgatggtgagcattaacatgagcacttctgctccaagctgtctgtgccatcacagctgcaattgagaggcattccttattctccctccctcaccaaaatgtaaatagctgtgtttattttttctgattgaatggttaatgcatgctaactataaagaagataactaacaaatctgaaaactgaaaagaaaatgttccttataaacctctagaagtttgtgatagcaacttcacaatgaaactgtatatcattccaaatatttaaattaaatatgtcaaatacaacatatatttatccaaatgagatcatacaatatgcactatttcatcacttgaattttgcacgcaataaatcatgaagcatgctgaaacctacttggtagtattgtaggatgtagctctccctagaaacctggctctttactgaggaacatgcagcatttctagtttctgctactaaaaatatcatttcataaaccttcagataggtacacatttgtatgatcacccaataatttcctaatgaagtgcccagaagtagaattgccacattaaaatgaatacatattatcctacagatttttacaatatccttcagaaatattgtaccagtactcacccttaccgattgtccttgaaattgtgttcacccaccacttaaactatatcagatgttattctttttaaattttgccaatttgatggataaaactaatatctcatggtcagtataatttacatttcttttataacctgatctgttcattggccacttgcctttttttcctttttgagtttcttttttcactttttttgtttattatttatttgtcagttttctcccctacaccttctccattgtccctttctgaaacttcaattcattcaattttggatgtatattttggtttttcttttgcttcatattgtgtgagaattctgtttattttctagactgtctaacgacttgctatcttggcaattatatctctaagaagtctttattgttctcagattgttctcttttcatagtcccttcttcttgctttaaataaataaatatatagatataattgctgcttcttaattagcttatttatttatttatatctatctatctgtcatctgttatcatcatatgtagacacatcctttaattattttggcttccaagagaataggttgaaatatcagcagtatccgtttatatgaagttgcccatattgtgcacaagttccacactctggaagtagttttggaatggatggagggagagaggtattaccaggtttgtgactgccttatagttcccagtatcctcaatttcctttttcttcacttttgaaacatttgtccattttcacagaagccatgattaccatattagttagagtctgttttggcacaaataatgcaatgcattcaagagtagctaaacatgttactattacaggatggatattgttgtttttcctcatgtgcctaggatctgcttcagaggctcaggactgtcagaaccatgatctgaaattcctgtggcctttcctaaatggttgcaagatggaaacacactcttgttttctgggagggggagagtgaagagataaggaagaaagagtaacacttagagctggaagcagaaactgcctgctgtcatcgcattggccatttagaacaatttcccagcatccctggggtttgaggtgatcaagtgacaccgtgactggtgcagacactgctagcttcctatctattgcccattcttaacttctttcttactaatatgactcagagttttgcttagtctgtttttgttttggttcctgatagattctaggacttttcggagtgacctgttaattaccttattttaaaactccccaacagtgcttagcctaggcttgagcacacagcaggtgtccacagttcctggaatttggttggctgccagtcaagaacttaataaaacatagctactacttcttgaaattttcctatgccaagtacacttccaaatgcatcacgtatattaatacatgttatcccaccatagccttatgagatagatattattattattacacccatttaactgatgaggaaacgaaagcacagagcggctaagtaacttgcctgaaaccacacagatagaaagcagaaaggagggaattggaatttgaaggcaggcaggctgcttcctgcacttgtttgctaccgaattgcactagtaaattaagccgtaagtggcttacaccttcaaatcttcattacgtgatgaaaagtgataaaaagcaagaaaatatacaactactttaaacctatacattaaggggaaactgacagccatgtaaagtcaaggagctaaagaaaccttgatggtacagacgttccatctctcacctctcgtccacgtggatcacaccgaaaatataatcaccttcttcctcattcattctgtgtttgtggaaacttcccagtgatcaaagctgtcttggggtgaagggtgagcccagccgtaaagtgagctctgtgaagactgctgcctttcctccagcccagggctgtcaacacagtggctggggagtgttgtgtgactctcctttgaagcaataggtccattgtgcaatctccatagcatggcctagtgggaagacagaagcccaaagggcccagtgtaagctcatccagaaactaggagactgcagttccacatctataaaacaaggctagtttggatttctgggaaggaagtagtttataaaatcagcagataatatgtagatccagatgtaaaatgttggcaggcacaatgagggtggctttttctcaccaaagagagcctttgatctttgcacagagccaaggtggcaactctagcagcctagtttaacttcatttcacgatctgtgaccttggttcccaaactttcatgtaaggtattgcccatttaacagggaaggagacctagtcatggcctctgggaactggagaaatatgtacagtgctccaagcctccatgaaaataggcagacccagggatctgactctccttttatctgtctcttcagagccctgctcatcttctctagtctcttctatggcccaacaggaaattaacatgacctttgttctcacagcatagcagccacggtaggctaaattatgctgcagtaacaaatcacctaaaactctttgtggcttaccacaagaagttgatatcttggtctcataaagtagactgcagatctgggtgattctccaggcaattttcctccatatttagcaagtcagattgtttccttcttttggcctttccatttcaacactaagcaatccccaactggtgcggatgaagaaagaggtggagggtcaagaagctgtaattaattgcttgggcctaggagtggccctatttctattcatgtttctttggtgagaactatttacttagccatacctaaattcaaggaataccttatgattctctgtgtaactgaaagtagcagagtaccaaatattggtgaacattaactctgttgatcatacagacaaaagctgtcttcatttgctaaagagttccatctggctaacctctgagctattacctttgtgttagccagattcaggattacggagtcttggtgaggaagaaacttggaggccattagtccagtttatcccaattcaggatccttgatattaatcctaacaaacgattatcaagcctctctttggacactttcacgatggcgtctcactatcttatgagccagaaaattccatgttgagacagctctttgtaaaattcctccatgttctgatcctgtctaccttcctggcagggccacttctcaagtccaattctctatgcttaatagaactggctctacccacccccactctcccatgccccttcaaatgcctgaggccattggcatgtttcctccttgctcggttccatagcctcagttccctccaccacccctcacgtgacctccaatttctccctgtcttgataaccactctgtatgtcaccttcttttagtgtagtattcagaacctcttggtctgatggttgtcagataaagtgttatcactgatcttgttctaggtgttgcacgattctagcagtgtcaccaaagcagcattacttttctcagcaaccacatcacactctgggtttatattccaactggagttattgggatttgaagtctaaaactgaccccctcttcccttccaggttctgtcccatggtttataggcaaaaagagatgtaaataaaagtgacaggctgattaatggttgggcatgcatcccaagattgacaaaaggcaggcctctttgatttaaactggaatagagaattcatcttgaatttttgaggctgaagggtgaccgcagctctctgcattctatattgaagacaactgggaactaatgtaaggctgacttaactcactcatttgaaggtaaagaaactggaacacacacaggtatgcatgcacacccacatacacattagaagatggccaggcctgcctacagaagatgagcccttggcctggccacttatgcttagactgcagagaaggaggaagaggctactggccttgaagcaagctgtgaaataaatgggtgaaaagacacagtagtcctgtccattagctaagggctctgagtaatacactttctttcctttttttttttttttttttgaggctgagtcttgctctgtcacccaggctggagtgcagtggtgagatctcggctcactgtaagctctgcctcccgggttcccaccattctcctgcctcagccccctgagtagctgggattacaggcgcctgccacaacgcctggctaattttttgtatttttagtagagacggggtttcaccgtgttagccaggatggtcgctatctcctgaccttgtgatctgcctgcctcgacctcccaaagtgctgggattacaggcttgagccacaggcttgagccatctttatttaaatgtctactagaccacttcccaatctaacaagatcattttgaatcatgatttgatgatccaatagattaatttttccccattccaggtgatgttgactggttttgtgttatgcaacctacttaggggtaggttaaattgtcactgcaacacaatttaacctaccctggctctgtgctttgagaacagaggatatgtgagtttcctgttggatcagagaagagactagatgggctgggcagggatctggtgagacaggagagcaacagttacagagaagtgggacacacatcttaatatttctaaccaggctgatgctccttgagtatcatttttagctataaattaatatgtcacatagcacaagattaaaaaaatagtatttgaatgtgttctgctaaaattttactaatagtaaagccttcccaaagaggaaatgggattggtttgtcacggcttgttcttggtgaacccctgttggctcaccttttccaggtatgccaccatcttcaatgtaatggcttcacttagaatctgtctatgaaggagtatcttgtcttgtcttttggaatccacccttttcttctttatgctcaccaggacaacatctgtccatctacctctttactaggctgatagattttttaacattcgaaaggcttttgtgcaagaagaatggttatacttgtacatcttggattcgataggaaatttatgaatcttaagattgtaataataaatatttttacatgatgataatatttcctctaatcatatatttctaatataatctttcacaattatgaatacaataaattaagcatttcctaatgtttatacatcattagaaatctatttgatcaaactttccacttaataaaaaatgcagatcaaatgtatgagattctctttaatgtcttacatgctttgtaatagtggttaaatatctgaatctcttctgagtagctgccccaatctaggtctcctctctgcctgagtgcgtgggaggagcctgtggcccctagcaatctgaaatgactccttggccaattccggctgaagggctgatagcagaaatgaaatgtgcctcttctggctaaaacactaaactgctagaacaagaccttccagtggtcttttcctctgtctcatggtattggttgtttttagctacataacaaattgcccgaaaacttaggagtgtaagacaacagacatttgttatttcacagtttctgtggatcaggaattcagaaatggcttcctttggtggttctggctccatggtctctcctgaggttacagcccagatgtaccctgggctgcagttatctccagagtggagctggaggatttgcttgtatgactgctcacttacatgctgttggtgcaaggcctcagttcctcactggctgttggaaagaggcctccactccataccacatggacctctcctaggactcattgagtagcctcaaacatggtagctggcttccccaggaatgagttatccaagatataataaggcccaagtcacaatgccttctatgactggtcctggaaaacacaggttgttgcttctgacacattctattcatcaaaggcaagtggctaagaacagtccacacttaaggggaagaagatcagtctccaatttttgaggggagaagtataaaataatttgtgaacaaaattttaaaaccatcacattgagtgactgaacaggctgcattttctggatgaggcaactgcaaggctgtggagcctctgtcagcctgggttcttgagtgacctggtggagcagagggccctttgctgaactgagatggatatgaagcacaagaaagaaataaaccttcattgtatcaagtcactggaattttacctacacatcctgactagtagtcattttaagacataaacataaataaaatcacactgataatatgtaaatgtggttacaaaattatgaattctctgtgtttaaatgatttttatttgaatatcattcaaaaagtttcattttttacactcacatagggcttcagtaattctatgagatactaataatcacagcagatcccaaaccaggtgcataccatttcaggagagaagaagttgcagattctggtccaggataagtctgtttgtttaaagtgatccaaaccaaaccactgattgagtgccttttgataatacagttctatttgttacatttggacttttaagcctctgcctttcaaaagctaaattcaaagatttaattttttaaaacttggtgtctttcccagaaatgatgtattgtaaaaagtttcttatggctagctggcagtacctaaactattgtcctgtcattatgatgaattggcctagtctataaatattaattgtaaacttatgcatgccttatcaatattacattataattagtggggtcatcttgaggttccatctactaagagatgagagatggagtgtgtgcaatgtttagctaattaatcatcttagaacactgtgaaattccctgtttaattggttgctgtgtaggatcacgagagcaatcaattgtttgattccctatactatgcatgttttgggggattttagtttatttatagttccttgtgtttattctttcttatgcacagagatagtgagaaagataactctatactttgtaaatggatatatgctcaatagaaaaatgtaaatacaaacataagtacttttctatttattaaagcaataaaactaaacaaatcctaacatgtgcattcttttgcacacattatattaactttgctttttcaaatattgttgtaaatccatgatctttcacaaaatcaacttgtttcagctaactttgagtattattttatttttcatgctctgcttggtcgatgggacccttcaaactgatacctttgtcctttcaacagcaacttactgtcatttttaaaacagtcttgttttctggcattgaggttgtccatactcaatattttttctgtcctgagatttgggaccaagtgtcttaattccttttggtagaaaaagaatcaaatctggaaccagaggcacacaggagctctggcagatgctgaagccacctagcctatatcctttctcaccttctgtgatggttaattttttgtgtcaacttgactgggccacagggtgcccagatatttggtcaaacattattctggatatttctggatgacattagtatttgaatgggtagactgaataaagtagattgccctccctattgcgggtggaccccatccaaacatttgaagacctgaatacaacagaaagactgaccctcccgagtgtaagagggaactccttttccctgactgccctgagctgagacataggtcctctcctttggacttcaacagaaacatcagctcttcctagatcttgagcctactggcctttggactggaactacattcagtcccttggttctcaggcctttgatttcaaactggaactacaccaccagctctcctgagactccagtttgccaactgcagatcctgggacttctcagtcttcataattgtgtgagcccctttcatatcataagaaacactctctctctctctctctctatatatatatatatacacacacacacacacacacatacacatatatataatacatatatatatatatacacacacacacacacgtatatatatatatatatatatatagttgtgtttctctggacaaccctgactaatatgtcttgctccttataagaactctgattgcatgcaggtgacaatgtgctcagctagacagatgtgccttcacggactcgtgcagctgaagatggcccaagttggcatggtctaagccacatcaactcttgcctagatcattgtagctgacttctagttcctgatcccgctttgctccctaaaccagttcttctcacagcatccagagtaatcctctcacagtgtaacctgatcacatcactttttatgcccaagactcgccaatggcttccattcctacaaagcgagagcaacatctctacagtggtctccaaagccttgtgtgatatgaatactgaaagtgtgcctcaaacatggaaaggaattacattctacacctgtttctcccatgtccacttcattgttcttcagcaatgcagcagtgtgtggataaaatctttccatttcccattggattcacagtcttgaggtatagtcctcacatattacagtagacgtggtacccattgacttgctccaggcctctttatgctgtcgtcacagcatgctgtaccttgtcctccatctcagtgtatgactgtgtcttgtgtgctggtcctgggtgctctggcacctcaccagagaacctctgacacagatagttacaggcaaatactcgttcttctgttttactgtcttggatttcttctgtaaagattggggtagaaggtggggtacaacatacacagtggatacaaatgagaaagattcaacttagtacttatttattcacttcacttcatcccacaaataatttgaaggggcttatatttcagcttagtattaagaagagctgcccagcaaagactcctaatggaacagaaaattttaggaggcagtgggttcgccatctcagcaggcattcaagtacaaactgaaggacaggtcgctaaggctgctggaacaaagtgttctgagagcagcccactctggatgctcagtctgcttcctgtctagttttccctgggatgttctcctccttctgagctccactggctgaggtaaatgctgttccttcagaaatcctagagaagccaaggacccgtcaccatagttatgttcatcatagacataaccatgacaaaagacaggagaggacccccacctctcttttcagaggttcatcttctgacagcgatgatacagaggggagggaagctggggaaatgcaccacctgattacatgacatcagcatcaggggatggattagaagttaggctgctctctaaaccaatgaaatgagtttgatttttccaccctttctcaagaatccctccctctccattgcttcttctagaggattgatatttaaaagttgtttttggcatttgtcaacatacatttcttccagatgttaaccaaagatcccagaccagttttgatggcatggaagtgctcaaataagtcataagaattttttaaaagacgaaattggtggtgagtccagcctgggtcttgggtcttgaacaggattttttatttgctgaaggcaaaagcctgtcctcaatgctctcctggccaaaaatattatttgcatttaaagaaaaataatcaaatgcttttttgggtgcttacacttatttttcccttctgtttagactgaggacagttggaccctgttctcagttaacctcaacattcccagccccctgccttcatctctaattaaagagataggacaaatggcattttaaatttctttaaaatttttcaataaacaaacacacatttcagcatccagcattttatttattctaacatgttcagaataaatagaacaaacagaatttacattctctgctccccacttcattttacatgccttgaatgaaacatctcaccctccctttagaaaatatgacatctattccaatgaaatagatgaagatcctgagttgaaaaacagtctgtttttacttgcccaaattcctacagaaatgaacccagtagaacctgggagttcttggctggaacaaatttgttgatggagattagggcctaatgtttttcttttagttttcaacttagatcaagaaacagtctgattttggaaattaccctgtaggaaagatggaagaaataattttttttcacagagtctgggatgtcatattttaaatatgcacaagaatatgtgcctgcaaaagagctttctttgagcagattgctgctgttgcctgctttcgtccttgtgctgaaaacctgattttggagaaggaggatcagtgtcaattctgcagagggaagaagaagaaaatttcaactgggtatatgtatttcaatttatctgctattcactttgtggcaggttttatattccaaaaaagagtacaacaatattttccatcctacatgctctttgacaatgtgactttgcaaccctcacatagacagactccatgttccatcctcttgaattttatgagcttgtaaaaaaaaataaagcaatacatcttcctccttaaccacttgaatagtagtgctagaggcctgaactgattatccatgtggccgccatcttatgaggaagacaaggtgacatggagacgccacacataggagctgagtgaagaggtcatcagatgattcctgctgccagcggtcaagtcacacccagctattctaggaatcccagcagaggctgcagaccttatggagcagagacaagccatcctactgtgctctgactgaattccagacccaacagccatgagcataataaatgaggatggtgtctggggctgctcaacaaaaacccctgtgacattcttgttctcaggcgcctgtaggagctctgcacccccacgttcccagggtaagcagagcagcctctgggcagtcagctggcctcaggcaaaggcctccacacagattctaatgagtggcagagccagcagagtcctctcagaagccgcagcctcctgtgggggctctgattatgctgaaatggatctgtcttgaggccactttgaactcctgggaaactctgcaagttgaaagtattatccaccggactggctgatacatgaactgggcactacggttggcttaactttacagaggggttggaagtcaactcacatgtgtggagcatcccctctgtgctggaccttgggttaaggttctctctgctgcaaatcctaggcaataagccctgaactcaacaagtctcagtttcttcgccttagagttgctctctctgtaaggcctcaaggctgataagagacaggtcttcatcatctcatcacttggtgaaaaacttggtgctgggcagagcatggtcaatatttgctattaatattattatcctcagtacctaaagtcaactccacaaagagagtattgtcattctcatctcatgtacggtaatgagcactcaggaggctgagaacttgtgaagagccacaagcctctgagaacttgaactagaattcaaacccaggtctcctgtcctccaggcagggcaccaactggcagccaccacctcaagcaagcatcccttgtctttggcttggacctttgcagtggctgccagtgaggtctttgtccaacttactttctactctgcaggtatagcggttggagggaccaaccactcacagtgtcccctttcccaggttgcgactgcgtcccttacccacagcagtttaatccatagagatggaaaaaagaatgaaagttgtcaggggctgggggctgggggttgttgtataatgggaacagagtttcagtttggggtgatggagatggatggtggtgatggttgcacagcaatgtgaatacacttaatgccactgaatttaaaaatggctaacatggtatattttatgttatgtgtattttaccacaattttaaaaagtgactgcatcccctaaaggatgaggcccaagctcctccacatggcatgtgggactctccctgaaggctatctggtgagaccttagccacccctgcagcctcgtctgcctgtccctgtctccctagcccccgcagctccactcctggcttccttacgcacaccacaccatttcttcttcttgctcaagctgttcctgagattctccttaattccccctctcttctcattttgagggctcggcctaggtgggggcttggcaaggccacctctcctcacaggcctcaggcttccagcccgtgctctgcgctctgatgtatttgcgggcccaccctgcagaggactgtggtgatctcgccatctctctctgctaacatgggggcttctcagactaggagctgcccccaagtcatcctgtgactccagctcatcataccggtgctggccaatgatccaaccagctggagcagcagcaaccacgtgggcagcagcctggagcccttgccggggagcggaggtcctgagggatggtgtggccctgaactcaccctgacatccacatctgggtccagggatgtggggtggaggagactggcctgagggtatagggttgcacaggtgggacacaccctcaccctgcatcacagagggctgcatggagagtgggagagggtaggggaagacattgacagggaaggtgtcctcttcctacgtagaggccagggctgtgggccaggatcagatgcctcagtgctcaccttccccatctctggcagaccctctggactgtgacatcctgtgggtgcttgtgtcagagctcccaggacagcagaggcagggatggggccaaggggcatgtggctgtcaggtgagagggttggaagagggtggtgagtttcgtactaccctttcctcctgggatcagtggctgaggtgtgacctggtgcccagcccagtctggacccaagcctgccatgctggtgtctgtagagaggcaggagcctcagagctccatggcgacaggccttgccaagtagctggtacgggtcccttccccacagcatctccctcagcaaacctctctgggggtgatgccacagtgatcaaaggcatgcattatggagccagcctgccctggtttgaatcccatttctagcactgactgcctccgtgaccttgagcaagttgcttaacctctctttgtttccatttactcaataataaaatgaggacactgatagcacccacatcctcaggttgttcagtgtcggtcctgtagaaaacattatgtagatcctgggtattaaaattatgaccctgttcctgagagaccagtagggagagttttggatgacgattctgagtacgacctggtagatgaggtcctgtgatttgtccccttggggacaaagccaggccattgtcactgcaggttagctcctttaacttttccaagaggcacatagaccctggggctctcacagccttcctgccctgcataccacagtgaccccacgtccagggcaggtttgggggtctaggtccagggggcacgtcggggcatctagaagctcctccccactccatgtaggctggcccgagcagtgctgggggaggcgggccactttgagccagaagataaacatattaactgaactttccatctgtcatttcagagagtcatttactgcctagctgtggttggaaaaattaagtccttgtaatttagagtcaacatttctcgcagaatcatgttagacaagttggcggcattcgcagcctctcggcagttgcctacaatcaaaacaactttgccctggacccgtggactcccctgccagtggcatggctggctgttctgcactggatacagagcactacaggccatggggcaggcctgggaacaccaggctgggggcctcaggaggagcggcaaggcagagcaccctcctccagggttttcccctttgcctaatgcaaaaccaatctcccatctattagtgtgcaagcgccgccgtacaaaacaccacagaccgtccttaaaccatagacatttattttctcacaattctagagccctggagcctgcgatcaaggtgtcggcggggtagatttgtcctgaagcctctctccttggcttggagatgtcgccttctccctgtgccttcacacggtcttactgctgtgtccatctgtgccctaatcacttcttataaggacatcagtcatattggattcggactcaccctactgacctcatcttaacctagtcacctctttaaaagccttatctccacatacagccacattctgaggcactggagttaaggacttcaatgtatgaatttgtttggggggaaggtcacaatttagcccataacacccagtccattttggattagttcattctcagtctacccaggagaaactggtttcattggctccattttgcagatgaggaaactgactttggaaagacaggtggtggtccccaggtcccacagcagcaatgccaggccgggaagccagggctgggatttctggttcacacaatttgcatcagagcccagctgtgtctgccccacagccccaaggtgagcattctactgggtcccctgcacaggccccagaaacccccagaaactccatgcagatgacagggagatgggctgcagcacaggcggaagtgtccagtagtgggtggggagccctgggaagcctcaggcagagacccctgcttgcctcgggaggttgtcttcagtgatgaactctgtcatacgccgtctgctcttgctgaccctccatccttacccaacctgaggggcttccccagagactttctcattattcagcctagttttagtaagggagatattggggcccactaagtgctggtgctagacaacttagtttaaaaaggggcggggcatggtggctcacgcctgtaatcccagcactttgggaggccgaggcaggcagattacctgaagtcaggagttcaagaccagcctggccaacatggtgaaaccccatctctactaaaaataccagaagtatctgggcatcatggtgggcaccttaatcccagcttcttgggaggctcaggcaggagaatcacttgaaccagggaggcagagtttgcagtgagccaagatcacgtcactgcactccagcctgggcaacagagagagactttgtcaaaaaaaaaaaaaatcacagcaggctgtcccagaatcaagtgggcttatccctagaccttaggctacgtagtggatattgtaggaccagcccaaattcctcattttgaaatggggaaactgaggctcagagtacggccctggtttatccaaggtcactgtcttagtccatttgcattgctataaaggaatagttgaggctgggtaacttacaaagaaaagaggtttatttggatcatggttcggcaggctgtacaggaagtgtggcaccaacatctccttctgataaagaccttagggagcttccactcatggtggggtggaaggagagtcacttttggtttccttgactctgtttggtaaaggctgtcctaattgtatgcaagagatggcagacacaggcaggcagaggagagatcgatctttcaaaccagttcaggcagactcgacttctccccagcggagcggagcaggtcactgccacacagatctgcagtgtggtctccgggagcaaaaggcatgtggaacacatcaactatatgtggccatcagaaaacttgctctcataaaggtctctctccatcctgcacctacccccatattctgaggtggaaactgaggctcagccaggctcagtgacctgcccgaggccaacagtgagagagaacccaagttcccagctccagccccaggacagtcactgagactcagtattgactttcaggtcccacatgggtttcagcctcacagagacctgaattctgaccactgggccgtggtccctgttcggaagccctgctgacagggagttgagtggggcatgcctccaagtgatggcccctggaccaaggccagggcatctgtatccaaagtggggagagttctctgacacccctcacgctgtgtgccaaggccccacacacatatgctatcatttccagggcctcctgccctctgtttcccctgactggggagaagaaaatattagtgtggctgccccaggggtctgaggtctgctgcccctctgtgtgtggcattgccctaatctcccagccctgccctcccacaggctgccctgctcccccgcccctgcacttccttaggaagatgcacagggaaggaggtacagcgcctgcaaatgagaaatccatctcctctctgctccagccctctgccttgggaactgcagaaggcccctctcctgaccaagccctcccggcaagaaagaactctccttgaaaacatggttctttgcagctgcccaggacagcttagtgtgtgtggtctggaggcttcctctaactgtgaatccattgaccttggaagaggggacacctgtggtgggcagattctaaaatggccccaagattcctgcccctgcgtgtcaacacccatttaatttctttcgctgggctatgggcaggacccgtgaatacgctgcggaatcacccttgtcatcaggttactgtacctgacaaaggggcctgggcagctagaattgaagtccttgatcatttggctttgatttaataaaaagggagattatcctaagtgggcctgactttattaggtgagaccttaacgggaacacctccaaagctttcctgttggtctgggagaaagcaagcagccacacccctggagggcaccacagggccagggactgccttccgggtctctagcagctgagtgtggcctctggttgacagtcctcaaggaagcaggtacctcagtgctactaccacaaggtgctggattctgccaaccattcaaatgagccagccagctcccaccatgatttcagtccagggtaaccctggccagaggacctcaccccactgcacctggaatcttggaccctggaaactgagatgacaggtttgcattgttttaatccactaagcttcgtagctatccaaaactaacatggccctctccacccccaggttcctcctcctgataaatctctcagagctcagcctggcatgacagtgggcagggatatatctcagttcaagcatgtttgataggaaaagttaatcatcatgctgacaacataacattgaagcaaaaataaatccgttactatcatggttgtgggacagaggtgggaccaatgagagagggagacggagagagagacagatggacacagagagaaacaaagaaagaaaaagacacacacagaaagagagacagagaaagagagagagaaagagagagagactcagagacagactcctcagctgtcacagacacagtgcttttgttacaaatgctttcatcttgcttctgctttactcattcatttatttgtaaactttgtcgtcctaatagtgccaagaatgaaataaagcttagtaaattaatcctcactacttctgattagaactttatttttctttctggggaatagctggtccctgcagacaaggcagctagctctggggggagagcaagcctagatggagaggctctctggacgtggcaccgtgtagctcagcagcaggcatggcccttgggccgcctgggtgtgaacatgtttcccactctgtaaagtgccccagaagcaataattttgtagaaggtaaatatctccattttgaacctggaaaacggaaaataaggatggcagttgagtcatttgctgtggtttcaaggtgcatctgggacctcatgtatagtgttgcctttcttaggccatggtcagggcattgaagggtgacaccgagccatagacaccaggaaactttcccaagggatctcctggcagcactcagctcacagcaggcccttgtggccaatgtagccctcggggcccttgtgccctgaggtagccagtccctctctccttcccagcacagagcaggccagcctcctcagtggggaaggccatgtgactgattttgaccagtggggtgtgagtgggagtgatgtgagctgcctccaggatggagcatttaattatggatgggagccactttacatctcttgcccctctacaatctgcaagggggacccacaaacctccaggcccagcagcttgcattctgagtgaagacagtgaggagcagagtgcccagttgagccactctggacatgtaacctgagtgaggaacagacccgcgctgtttggagccactgacatttcttggttagttgttactgcactaacctaactcatattgaccagtggagcctgtcagggtcacttggtgcaagcaagtatccttactggccagatgcctcaatgacatgtgtactgacctgagccatgcaggggtgctgccttgtagagtatgatctggagttaggaggtgcgggacagacaggtttcctggttaacagaggaacgtttaaatctattggaactctgaagttcttcaattttattttcttgtatgcagaaatacttgaatttttatttacttgtacacagacatagtatatatgcagttatgtttcccacttttttgctcattttaaacatttctccttgttgctatagaatgtgtaagaatcacttttaatggttgagtaaatacttcgagtgggttatgaaagaacttaatcatcgttccctgtggtgggacatttgtattgtttgcagttctgtgctcatataagtaccactgcaataaacatcttcgtgcataaagcttgttttctgtttaatattatttactttggcaaagttcccaaaaatggaacacctgggcagaaatggcatgaagacttgcctttttcaaacaggtttttaaagtaaagcattcatccacgctgatgccataggatggtaagtccggggaaagtaatgcactctgtccttaatcatgaacactgagccaggcctcggcctccgacctgactgtctgttattactctccaggacttcagggatgcaggccaagctccagaagtccaagcccacctgggggctgtgacccaagaatgggacccaacagctttagctccgtactctctggctctagcccagctcacagaactcccgaggggccaccactgtccccccagatacctccactgactcatcggccccccagggtgtctgctggtggtcggtggcagccctccttctccaccttgaggttcccaagcacatctgcctctggctgctgatgccacctctgcaggctcagagctgctgccctgccccaggctacggcccctgcctgttgttgctcctccctctgagtggcagtgcctgcagctcactggggtctcacagctggagtgctgtaggtatatcctctattcaccgggaaaatgtctgtgttgggctacacaccaggatccctggggcccagctttttcctgccacctcttctagatctttcccctaacccacagtcctggcttatctccctgggagcctgagaaccctctgaggcactccacagtgcttcactcaaatcattctttcccttccgtgcccacgcaaacctgtgcctcaggcaagcctttctctcgtcaagggtggcaaagactgtctccttgataaaattttaaccaggctcctctgaaccctctttccacctagatcttggccttggtctgtccttagcaggctaagcccagttttagcaaagaatcctactaactcagttgatgaaaatcttcctatccttgatagctgatcaaactcctcttcctccacccctgattcctacccaaactcctcccagtaattttccctccaccccttctccctgctttctgtaaattcctgcttgcccctggtatattccaagttgagttcaatctctctcccctgctgcaataatcccaaataaagtcttgcaatttttaacaagtgtcagaataattctttatgacagaggatatttcttccatccaggacaacaagatgggagaagttagtatgtggggtaaagttagccctggggaatggctgtcaccatcccctagactacagccttatctctccgataaagaacatgatccttggtgtaaaaccaacccatcacacacacaacagtgggtgggtcaggagatggcccctggaaactggaatatcatgcaggacatctgtgctgtggaatttctgtgctgtgttggagagctgggatgccctgataaaggaatgttctgagcatcttccctagagaacagagaataccatgcccccctacctagcatcccagccttaccttcaccccacagcatttccctttaggccaagtatccattcatttagcattcattgattgtgttcctgctacatcatcttgtcttaaattattagtggaaactcagtatcttcagggtttttttctcccttaacttttagttttattctattcattcagcaaatatttttgagtggctgagcacctgtgaggttctgaggacaccacgatggagtgcgaggtggaccgaggctctgcccttatgcagctcccagtctcagagagaaattgacctgaagcagaagttttgtgtctggcaagatgatgcctggtctcaagactgagttgtcaaagactgggtcacagaccggaaggtcaagcatctagacaatggtttctttgtgtgcatgtggcatcaaacatttcaagtagattgcaataattttcagggtgtgataggaaataaattatttgcacctttcccacttccttctccttctcctcttcctctcttctttctcttccctttcccttcttacttgattgtcccagaaggtcttgaggtaattccactgcaggcctgtgcaaactcgccctcaccatatcctggtaggaaggtggggcctcaggtaccagcagaagctcaggatggcagtggccgagccatcatccagtctcccagtgagaacctcacctcaggggctagtccctcttctctccccacctccaccctacctcctcttccccaccccccaacttctgccttgccactgtgaaacccttgcctggtcctctgaggaggagacgccacccctgcctcacttccctgcaggcttttgcctcctttgtggcccttgagcccagtgacgctgtggctgagggtgttggcagatgtttctcccttatcagatggcttaccctgaggatagagatcatctttctgtcagagcacctgacacacagtaggtgttcagaagacatgcatttagaagatgaaggagaagccagtgatccatcgtggtttccctctatagtggccacacagggggtccccttgctgtggccccacacactggccctcctgcctcagctcaaggcctctctcagaggccaaggctctcagaagaggtgatgtctggccagatggtgtctgaccaggcccacttcacctggggcccgttcagagaaggcccaaccatgccatgttcctgataacttgttctagaagtgtttgtattcttgaaggctccattgcaggcaggctgtgggactgccctgcagcgggtgagcctgtctcctcttcctcggggaagtgcgtcttcatggccagctgcctgcatctctggcccaccgaggtcacggtaaagatatgaggtcagcagttcaaaccaggtatccctgcaatacgtacaaacgtggaggaatggatgcagcatctagtgtgggcaagggttctagcaaaccacccccttcacttgggcaccctgctcaggtgagtggggtgtatatgcactttagagttcagatgagaaagagagaaagaagggggcaggtgtgagacagaaagagagagtgccacatggtgacaaagcaaagggccagcaacaaagtggccagatgagggggacacatccccttgagctctgctcaatgaagctctgcaaggctgctgagtgaaaaggacctttctgcttcacctctgcagccatccttgcctctgcctttagacatgttgcatggtgcacgcttgcggacactgccgcttctctgtggttcattcactcccaggcagttcctagcacatggttgctctaaacgcctcccttctctcgggtcccatctcctcctgctctcatgactgtctcctgcctgcttcccagccccagccatcatgtatgtttgttcagaactttgcaccttagggtcacctttctgcccatggtcacattagtccacacggcagcctcaaggtgacaccgctattaccactgcaaagacagtcagggtggcacccatcagggtcaactcccaattgcatgtctacttttgaggtcaagatagttctccacattggatggacagggaaggtgccatgcaaaggctgcataactgctccaaggtcccacacagcccatgagaagagacagagaagatacggcaggcagtctttgtgactggattctttcactcagcataatgcatttgagattcagccatactgctgtatggatcagtagttattttctttttattgatgagtagcattttattgtttgatgtaccataatttgcttatttactcatggacatccatgtgggttccagtgtttggaaattatgaacaaagctgccataaacatttgtgagcaggtctttgcatggagttccatctgggtccatctaacgaccaagcctctgttccttagccacgagcttccactgacacaaaacgcaattgcgaaagcacccatcctgtcaaacggccactttggaatacactgataattgtcactttgtttcttggggtgtatatattgggaggtttccattttctcataaaattaacagaattgagacccaactatagaatgaatacattaaaagactaaaatacccagcacacacaatagacatgtcagaaagactaaacaggaatcctgaccataccaacggctggtgaggatgtggagcagttggcgctctcccacactgtgggtggaaggggaaacagcacagccaccatggtgagcactctggcagtggtgggaaggtcattgtagagtgagccacgcactagccatacaacccagcaaccccactcctaggtgtcacccaagagaatgcaaaacatgactccatacaaatgctcacaaatgtttatagcagcttcgtttataattaccaaaagctggaatccacgcagattccatgaatgaataaacaaatcatggtacatcatacaatgaaattctatttatcaataaaaaggaaaggactactgattccacacagtagcacggccagatctcacatgcattatgctaagtgaaagaagccagtcacaaaaacaacacactgtctgattctatttatatgacattctgaggaaggcaatactatagaaacagggagattcaggttaggggagaggtttgactacagtggggcatgttcaggaaatattctatatggacatagatgatgaaatattattccaaatataataggtggaaatactctgtatcttgattatggtggtgattacatggctatatatatttgccataattcatagaagagtacatctaaaaggacaaatgttatgtatgtaaaattataccttaataaatctgagttacagaaactacctagctcagcagatgctctttgagagtgagtgagcccaagcttcacccttgtaggttatgtaaatgcataaacctctgtgaaaacagtgattcctgactgtcgctgcaagttaccaagctgaaggtgagcggcaagagagctgcaaggtgtagcaggagaaagtgtgccaaagcgcagagaggaaggtggggaggggcccaggcgggaaaggagttaaggtgcagcagggctcagagccctgcacctctggagtgggtgtggcctgcctagaagaagcagtaaccaggtggtgatggaaacagtatccctggagagaggggcaggtaggggcaggacaggggtcggggccctggctggggttcaggaaagacccaagattgccaacacagcaagaatagccgatctcaggggtggaggctgcagcacagttgggctcatggcccccggtgagacctgcacacaagcactcagatccggggacctgggccaggcactactgggcaccagatgaggtgctgtccactcaggagaccgggtcgtcctccccactatgagcgtgagaatggcatgcaagagggcaagggcccgcagctgttacttcacccaggacacagtccagggctgtagcccatgctttgccctgtgtgttacagtccatagcttctctggtgcccaaggtggccctgtgcaaccctatctcaggcagcaagatgtattctgggccccaggtcgtgtccctggggcacctcgatgtggccccctccaggcaaagtaacccagacacagggggttggctggtggtcagagaggtgttggcctctgcagccatctgactccagcatagcgaagtggtgacatctgtcacccctctgcagcctctggccctggttttccagctgcaccacttgaggatgctgcagagccatgaggtcaaagaagtaatcctttccctctgaagtgaggacctggaaagtccacatttgctggagagcaggggaggcctctgcaggatggttacgccacctgtcaccaaacggtccaacccagccccagtaggggtgtgggcagagcaatttgctccctttgaatatctagttctgtagcctgcagtagcttagggagtggcccaagggggtttccctagttaagtcctgccggttcatcacccaagactcaatatgcatctggcattaggcacaagtggtgagcccaaagaggcataaaacaaggccaaggcctataggcagacttacccactgactggagataaaacatactgagggatgatccagctgcctggtgcccatccctgggaagggcaggtggctctctctgagggtggtgggccactgcactgccagtgagtttagaagacatggcacctcaggtgctgggagcactttctgtgttctttcctcttcttgtggcttgtcctgcacctgcacctccaaaggctttattttcgttgtatttcattgctgggctctgctctagggtggggcctgtttaagaggtgcctgttccttggcaccaaaattgttctgggcctgctcatgtggcatccgcctcattgtgcactccctggggaccgctctgcctccaattttgtccctcaccctgactcctctgtgtgaggccctctgccctccaaccacagaggtgctgccccagtttgcccctggctccttggctccagggagaggctgtgctttgcatgttgagttgattccttcagccttactggaacgtcatgtacccgtcctgacaggatttcatgactcagaaatgtgaggtcttctttggctgcagagccctgtgtaatgaaagaagcctgggaaatataacctgtgataggctaggacttctccaaacctggacagtccctcagcaaaactacaaagccaattgtgaagtcccggcagtttgtggtcgtggctgctctgtttgccacatacagccagccgtaccttcagagctgtaggcaaatggacggagggaccggtgctgactcttgcaactgggtttcatcacggcagtgtgctccagatctctgggcatctggaacgaatgtgtaaggagtgaggacagggaactgcagcctttgtcagctccctctgcccaggtggtgggttggggaggcccagcggtgccaggttccgaggataacttctctgctgctagactttgattatgtcagagtctcctggccagactccctatgtgagaaatggggtggggatgtcatgggacaagtccagccaccaagccctctaggtccagggtctgcccacatgggggacacctggaggccagatgtgtgcccacagggcacctggtgagatgggagggtgaagagaaactctttcttgtgtgaactatgtcctctgagtgcggcgaacccccatccaagcctcttcaaatatttacatgtctacctaggcttggacagctgtttggcaagggaggcagttggtcaacctccatatgctttctaacttgaaatagtgcagatgagctggtccttgttaaatgaattaggctcttactatttgagtccaaaacctgtctggctcaagatatctggtccttcactcccagacacttgaagatccatgcagtgtttccctaccctcagccatccagtgccaatgtccagccatttataatttacttaatattttctttaaattgatccactcatactgcctacataaatagaatttaaaaggaaactttataccacaagtataaataggaaactattaatacttgccataagtagaagggaactatattttaaaatacaatgaaaataaagcaagtttattaaattctagcaggacactgttttgccaagtttctcagattgaaactgttctctctttgttaaacagtgaaattatcatgtgttagagcagtgttacagacatgcctttgggaatctaaagagaactagaaagagaatcacattcacattacaaaagtcagtgttattttattcattcagttactaaatacccagcaagtggttgagtggagtggatagttcttaggactacaaaggcaaaattaaatataatcctgtttccttgtagagctcatgatctagcagagaagactgacaaggaacaagtaaataaattttaaaaaatcaacttcagtttgtgggaagaaaagaaagcaaagtatgtgcatagagaggagtatattttgagtaggtgtgtgttgcaatgtggggactgcacctagagtgaccttcatactgagtttgagactccaaatggatatttgaatggtgacctgaactgggtctatgtggaaaggctggggctgaaatgataaatttagggatagcagtagcatagatggtgttcgaagccacaggcccaaatgcctaggtggcacacgtgcatgaagggtgggatctgagggctgagcccttggtcccccacattaacgagtcaggaaggagagaaggagccagccagggagatgaagacaggcagacccctgtggtcttccgtggttctgtggaaacacaatgagagtgcttggaaaggatggagcgattgactaaaaaacgttgctgaggcattgagtcagatgaggacccttgggtttgacaagatggcagcacttttggtgggacagtaagagtgaacacctcattggagcgggttaaagagaggacagggagcgaggaaggggagacagggagcacagtcttctcttgactttttcaataacagtgctggtgttgaagaactcatctgcctgcagcagctcatgagccactcgaaatcaaactgtggatcacatggcctgaaaatccaccctggatacccaacccctgagacaggtaacacccccaggagggtgacttctaggttagttttcccccaggaagggtctttcctctctgggagctggggacccgggggcccgcactcaacacagacgtgtatagcagcagggcaggcccatgccagggccacacggccgcacacaacccgggcccttatcccagagcacagtgaggcgccgggctagtcatgctgcagcatggatatttattgatcttgattcacacgatccaagaaaagcttggccacagagcctttggttcaatcacaaggatatgggggttgggcatgggcgaaagagaaggaaatggaatttaaaggaatctgtctttaagaaaataactctttgtaaacctgatttatgggagcctgtgcatgcaatagtgaaatgctctgtaactccttggaggtggtgtgaataggggttctgttagccactggcgggacctccagaagcaaaacatgccagggggatggaagagcggccttcctggagtcaatctctagcagggcctgcgaggaagtggggcttcctcctccagccctcggacggcagcctgggagacgggagagcgctaacattgatgtgcatttttattttgaatgaacagagcaattaaagtgcaccagggccagatttaagttttctccttgggctgtttcgaagctgccttcagtctgacctcatctgcacccacacatttccttttatagatatatatatacaaaagatataaatacatatataaaatatataaatatatataatatataaatatataaatatatataacatataaatatatagaaaatatataaatatataaaatataaatatataaatatatataatatatatgaatatgtacatatatacatataaatatataaaatataaatatataaatatatataatatatatgaatatgtacatatatacatataaatatataatatataaatatataaatatatataaaaatatatataaatataaaaatatacataaatataaataaatatatacatatatacatataaatataaaaatatataaaatatatataaatatatataaatatataaatatatgtaaatatatgaatatataaatatatgtaaagatataaatatataactatatataaatatataaatatataactataaatatataaatataaatatataaaaatgtataaatatatatatctataaatatataaatatatatagctatatataaatatataaaaatatataaacatataaatatataaatatataaaaatatataaacataaatatataaatgaataagtaaatatacataaatatatataaatatatataaataaataaatatataaatatataaataaatatatatgaatataaataaatatatataaatatataataatacatataagtatatataaatatataataaatatatataaatatataataatatatataaatatataatcatatataaatataaataaatatataaatatatataaatataaataaatatatataaatataaatatatataaatatataaatatacataaatataaatatataaatatataaatatatataaatataaatatataaatatatataaatataaatatataaatatatataaacatatataaatatatgtataaatatatacacagactttttttttttttgagaaggtgactcacttggttacccaggctggagttcagtggcacaatggtagttcactgcatcctcaacctcctgggctcaagtgattctcccacctcagcctcccaagtatctgggattacaggtgcatgccaccatgcccagctatttttttttaattttgtagagatgggggtggggtgtcactatcttgcccaggctggtctagaactcttggcctcaagacatcctcctgcctctgcctcccaaaatgctgggattataggcatgagccaccacactggccagccagagaaattaagaaagtcctgcactagccgtgagaaacaaagtcggaatagtttgacttattttgcaggggaagaaagaaaccaaaacaactgctgagggcccagcatgttccaggtatctggtgtttgccttctttcttaatcttcaccaccactctgttttatagataggaagctaagggtgaacaagggaaagggcttgcccaagaccacagtgtgacagagaggcatgcaccctctgataaatggcctcttctgatgttctctcagctgtctgacttctgggcagccagcggagatttccatccttgaccacaaccttttcataattgcacagaatgtaaagtgatgggcactgttgcccagaggttgcatcctggctcctcagggctgtctgctctggttagcctgcatggtcagtgtggttccttctggtagtgtgatggcattggtgccctctcccaaccctctttccccataactccactccctatttcttcccataggtgggctctcgctcctgcacctgcttggctcatgtgagcattggccttgtgacccctgcctagtgctctatccactcacacgtgggttttctcatgaaatccttgtcataagtcccatttattcagataaagcagctgaggcccggagaggttcagcaacttgcctaaagtcacaaagctgagactcaaacctaggtctcagggtttcagacacccaagccaacaatctttccctgatctgcacatacccactgtgtgagctcttaaagccccacctcgactccctttatcaggactaaggcctaatggccaaattggaaaaagagtcacctacaattgactcagctagccagctcacagggctgcagaactgtactcatctgctaacagccctataacaatatcctctatgaaacactttgtgtgttttcttgtacctttccaattaccagaggttgattttgctctacccattttacagaggaagaaactgaggtgcatggacttgcctaaggtcacattaccactaagtggtagattcaggatgcaaacccagacttacctggctcccaagtccaccagctttgtaccatatttggcagctgccctttgggcccgtggctagggtacaaatgagagtggttcccagcaccttgcatttgccttgttgaggtacatgtttccctctttacacagacactttgtatctgttacaaagccaaggaaaagatctgaacagaccctaagcagcacattccatactcttgctgaaatgacccccttggaagggatgtgcagcctgctttgtcctaggggtggtctcgcttcccctccctcttatcttcctagtgcatggctctccagaaaaaccatgttgccttcccttcttcctccaggctggtaacactaagttgggaagggctgaattcagatcctcactcatgtccctctgccctgaacctcagcagctgtggataatatgtattgacagtttggaggctgattcaacctgttaactttggggggcatcacatgcctctcttcttgctccagaccctatgcaacacctcaaaaccggaaggcaaagccatcagttctgggctcaaaacttcatttcaaccacgcccaaagaccatgactgatgtgctccctcagggctatgagattctgtcctgacactgctgtgctccaaggaaagctgtaacgaatgagcatgaaatatgtggaggccaaggatgggaaggcttcaagtggcccggtgaaagcctctcttctgaaactgcatctggtcagggatgagagcaccttttctgaggctgagctttcagtcaagccttctggcttcaagggtgcagacccaacatgaaccttcggagatgccaattcatttactcttggcaaaaccgggcttcctctctcaatacaaatgaaagcatggaaggcttgtaaaattgactccaaatgcattgtgcatatctacaaacccttaaaacccaacatttggatgagctgctaggagatggatcagaaacacatggagtggattttctgtaaattgcactgtgcgcctctgaaattaaagggaaagagcttggcatggtccatttgggagtcacagatcttccagcacttgaagcatcagtgaatgttccccaggcagaagattctttggctcacttccacaggctctcattttcctcccagcagaacctgttaaagggggaaaggaaatgagaaatagaagaggaagcgagagggtattgagaaggccttcaggaagatgggctgcgaacttggggattgtaaagcatgtggacaatttgggaagtgtgggatgaagccggttcttaaaatctgtatctgtaaccaggttctcttggcttctccctcagtgattcaggcagagatttttctgggctggccatggaccttgcaaatgagtatgcacatcatttagaaactattcacatcctggagtggccagagcatgtagagtgattagaatcatgcagaccatttccatgaagcctggtgacacataggtcatactgtcatatgctattattctgctggtgtttgaaggcatgatctgttattttccacctgcttacttttaaaacaaagccctgttgactaagtgcattctattttgaatacttcaaatgaatgatactttgagaccaagtcaactgttgacattcagccaagactataacccatatgttcaaagttaatgaccatctggcctagaaaaggccagaaggatcacgcgatgtgtggaaagcacattgcagacaatctctgactttccaaagcacttacagacccacccaagaactgacagcccctcaccgaggccgccaccacgtgagccaccctgctgtgcaataacctgtctacatgtcagtccccagcaccgggcactgagtcccatcagaataatctcattcttgtttgttgttgggtggggatcaatgcagagcaatgggcagggcatgtgtttaggcatcagactgacctagcatttaatctcagctcagtcaggcttccagctctgggagagtccaccactccttgttttcctaccctgctctttgccacatgcggccccatcagaggtctaggtttacacaccttggttgagcctgtgggtttaaaaatcagagttctcactttgtctatcccagccaaacatctgcagcacgaaagctgctctgtgcactgaaagtgacatgaaatttatctcacgttacccttttccaggaccgtatcagtaggagggtggggctgtcagggacagatgcacaggcactggggaccttggaacaggggctcgtgggcgttagacatgaatctccagaataagtaggttcctggcatctgttctgcctagctccgcaccacccactgctcctgggcacggcttcagcaggtgggaggtgtctccccctgcccacaggggtatcccttgcatggagagacagagaggtaattacagaaaaactgaaatgcacattggcattagcagagttgcggggcagttcccttctgaaacgcattcattcctgtactttctgctttataataaacacatagccctttggaaattagaacaaagggactaaaggtctaaacaaggacaatgtagtacacaaaacaatgagacataggaagggacagacgtaagatatgacagcagagtgagggatttgcctctgctgacgtcaggagaggcttaggaaagaaaagaggatgatcatagcttctcaggcagccaggaggaaaatgcttcctggcaggcacctggacaccaggagcgtagtctccacgcacgagacagggcggcatgggctgggaactaggattagctcagggttgctgaaatgccaagggaggcagggcaggaagtgaggaagaagagatcagggcctcattgtagaagtcatatgtgccagcttcaatttgtatcccgaagggagtaataaaaggtaattaagccagggcctgacccaaggggctgcatttgcatttgaaaatttcttcagtgcatgtggaaggtgtttggagacaggcagggctaggatcaagagacaaagccaattagggtctatttttcacctgcttatgaaggctatcagtaagacagccaattttgctaagggtctgagcaagaaggaattgcggatgcagccgccagctgacatctgccccctaaggctctgcatagtccctcttcccacagtggggaagggggcccagtgggggttccctgggccatcaatcttcattaagtccgtcattgtcctcaagagccgggcagtgcttggaagggctgcttgatggaagtactgtgaccccaaagtatttagaaataaaggctaattgaccataggaaaatcaaacagataccatcactggtgtttcagcttctgggctcttggacacgtctcccagtcacacttctacctcatccccaacaatggagatgcctgcgaggcactcgccgaccctcccagcagtggaactacccagggacatgatgaatggctcctcactgggcactttggagacagggtgggagtagcaagtgggacagaagtcagctcaaacgtcaggcagagcaggccctttgctgtcactccagcccagcctgacgcactgtcccatcattgtggagaaatttttactgagatataatggacaaatgaaaattgtatatatttatcatgtatgacttggcgttgatgtacatatacactgtgaaataatctctacaatcaagttaatatattcattactttatatagttaccatttccttccttccttccttcccttccttccttccttccctccctccctcccttcttcccttccttccttttctctctctctctctccccctctctctttctctctctctctctctctctgtatctttcttggagtgagaatacttaagatcgaccctcagcaaatttcaagcacaactatgctttcttatcagagtaaaaatcctactgctggaaggaattcaatggcagaaccatgtttgtgttgtattattctcagctggatatttgataggatttaattggtacagaaattgaccattagcaatgtgctttcccacacatcattaagtaaattttcagtgggctgggactggtggttcagaggtgaagacctgcctctaagcagctaatggtcactctcagtgtgtgtgcatgttgtgtgtgcctgtgagtatgtctgtgtgctgtgtgtgattctgtgtatgtgcatgtgggaagtgctttaaagaacaagagccaccaaggaaacccagggtttctaaggaaaacacagcacggggagggatagagagcatagatagggtcagctaactaggtgaagacttttaaaataccaggcttgcaattggccaccctctctctatgtcctcacatggcagaaagagagagggagggatggtgtctcattcccttttattaggactccagttctatcgggtcaaggctccaaccttataacctcatttcaccctcaccagacatggaaccctgtcagaaccttcgtcttagacgttgcagcctccaggctgtgagaaaggagatttctgttgctacagtcactctgcttgtgatgttttgttgtggcagcccgtgactaatgcaagcaccctccaaccgagtacatagcacacccaggccattaaaaggcatcacaaccagggggtgggcttttctcttgaacccctcacttaccctcattaactgtatagacatagtctcatggggtttgagaaagggaatcctgtcattaaaaagatgactttctgttccctgcaaatttaatcgaaagatacatgatccaaacgttgtcctgtttcttggttgacacactgtgggtcagggttttccaagccaatgttttccacatacagccagaggacttaacacacagactaatgttcacctttccaccacttggggtaacataatgattgtgttggtttgttgatgaatttcattgcattccaattacctttaatgtattcatgtaacttgtttatgaacaaagctacataaggtcaacaaagagttttgtttttgaatcatgggctaaacttgcaaaagtgaaccatgagccaggaggaattatctcttgacagaataggaccttaaatgtttccagcagtgatactggttcaaaatcattgactggctctatctgtctgtctgtctgtctgtctatctatctatctatatctaccatctatcaatctgcctacctatctttgatgttccctaaatttcttatgattaaaaaaacacagaaatgaaaaatttcataacagcagtgagactaggaagagaatatatcagcatagggctgtgcctgactctttaatcataatcatatttaatcataatttattcataaataggaccgtacaaccaaagatattcagattcttgagggaaacatctacaaacctaaatacgctgttaataaaccctgtctgcagcccctcctcactctccccccgcaccgaggtggactaaggggctccagtttgcaactgtgggtgttcaggggtgggttggattgctcagacatttgccatttgaggtttgggattctgctcagccacttaccatttatccttctcctttttagcttacaacattttgttgatattaactactctcctgtctccttttttaaaaaaagcttgtgcttttaaaaatcactttactgccatttcagtggggcttggtgagggagcagagaaaatgaacatgttcagttatctctagatctgtaaaaatacactttcttctcactcttctaagaaaaatgacttgaggatgtactacaaaacaacaaagaagggatttattcctaaagagaaaatgtgtgctttccacaaaatgaagatgcaaacggtgctcagcactgggagaatctaaggacagcagctatgtggcacatctagaaaccaactggttcaaccagaaagtccctagaagaacgtttgaagacaaatgtggaattttcacaacacatattttgatttaggatccagacaatctttgtgataaggtgaatacaaaatattatttttaatgctaaaatatatacaatagacagtctaggaaagaaacataaaatcaaagctcaacatgaagaacattaaaatggtgcatgatttaggacaaatttaggctgtaaaaaaagagaatctttttgacatgtaaccattacatttgggtagcactggtttagtgacaaaaacttctatccctcttctatgatcctaatccattctactgaaatattacacaacaatattgtaaaagtagcttatttttatttttagaatttacctacaaagtacaggagactaattattatctcttataaaatctaatggaacttcccccccaacattttagcctccttgaaaatgggacgtactgtgtaaccaataaagtaccattgacggcattttcttagtttaatgaaacatacaacaattatgtggcatgttagatttgataaaatacaatataccgacaaaggagaatgaaaatattataaaccttacagtttgagataagaacagaactgacagatgatgagatggagagggaagaggaagagcaggaaaacaaaggttttaattcctttaacgtacatggagagtcaaagggtgccctgtaaatagagatcaagaaatagctttgacatattttgaagtcataaaaataaaacaaaagaactaaaagagaaaataatcacacatatataaataaagtttaggctgagtaaaatttgatgtatgtaatttaattttttttttaacggagaggagccaagagacactgttgaaagttggcagatcaagaactagggccctgaacatattatttagagctatgaaaaccatggcccgaaaaagtaaaagcagaaactttggaaagttattacccttggcaagaagggtgggagggaaagggagggttttattctatagttacagcattgtttggatttttactactaagggtattactgttaaaaaattaattaattcattcagaatggagcaattcccacaaattaagaaaaacaaaaaaatgcactcaagtaatattttctagaacttacaattaccacttctctaacacttatttgttaattatcttatactattcacagctaaggtggctacataattgcctggtatggagaatgtaggtaatatgaatacatgcatcttcttttaggtggatgatgaagtgtgccatctctatctagttgtgcatcaaacagctaagcattgtagttctgtgttgcttcaaagtaagaccaactagtctcaaattcaagttatggttttgtagacaatcctcatcccaagaggtttacaaacaaagatttgtttaaataaatcatttcactaaaaatttgctttctcaagttcaaatgtgaggtgctttctggagattctttttgattgggatacttaactgatttcacttactctgaacattcccaagactaaaacgattgtgttcttttagtaaggagtgcaaatgttagagctctggtcatccatcatagtttgtgttttctggtggatccaaaatcattttctgctgtgggaagttagggagcctgaacggagggactggatgaagccacagcagaagaacataaattgtgaagatttcatggacatttaatagttcctcaaattaatacttttataatttcttaagccggtctttactgcaatctctgaatataaattgtgaagatttcatggacacttatcactaccccaatcaatacccttgtgatttcttatgcctgcctttactttaatctcttaatccctgaggaggatgtatgtcacctcaggaccctgtgaagattgcgttaactgcacaaattgtttgtagagcatgtgtgtttgaacaatatgaaatctgggcaccttgaaaaaagaccaggataacagcaatgttcagggaacaagggagataaccttaaactttggctgcctgtgagccaggcagaacagagccatatttctcttctttcaaaagcaaataggagaaatatcattgaattctttttctcagcaaggaacatccctgagaaagagaatgcgtccctaaggggaggcctctcaaatggccgctctggggacagctgtcttttacggttgtagataggggatgaaataagcccgggtctcagtagtgctcccagccttattaggatgaggaaattcccgcctaataaattttggtcagactggttgtctgctctcaaaccctgtctcctgataagatgttatcaatgacaatgcgtgcccaaaacttcactggcaattttaatttcgccctggtcctgtggtcctgtgagctcaccctgcctccatttgccttgtgatattctattaccttgtgaagcacatgatctctgtgaaccacaccctattggtacactccttcccctttggaaaatcaataataaaaacttgctggttttatggctcagggggcatcacagaacctgccgacatgtgatgtctcccccggacaaccagctttaaaatttctctcttttgtactctgtccctttatttctcagaccagctgacacttagggaaaacagaaaagaacctaagtgaaatatcgggggagaatttcccccaataattttctacagatgattgtggaacacataaacacacacagccctgagcaaggactcaggcctaagtcattgttaggcatcttggtttcctcaggaggcaatcaacacttcctccactcaacttcttgccaaagcttatggatctgcatttaatcagcaacagagaacagctgcccatcctgtagctgttggagaggacagccttcaatttgttgacatgtgatagggatgatttctttaaagttcatcagctatttcacacttcccagtattgtgaaaccaacatctatatcaagtcagttcagcaagcagtcggggacctggagtgcacagagaatcactttcactagttgcttgatgctgtttttccaagctgagagattaccttatggaagaaattgatagaattaccctgggacttcattcataatcttacatcacaatctctgtacaaagaccaccaggtgaaaacatttgaaatttactcttggtgaatttgaaatgtgtaatacattattatttattatgtttactatgctcaccacaaaaatgatggttgaggtgatggatacagtaattagcttgatttaattattttacattgtacagttgagacttgaacaacatgggggttaggggtacaaacccccaggcagtggaaattctgtgtataatttttgaccccccccaaaatttaactactaatagcctactcctgatctgaagctttactgatatcataaacaattgattaacacatactttgtgttttatgtatcatgtactgcatccttagactaaattagagaaaagaaaatgttataaagaaaatcatatggaagagaaaatatatttactattcattaaatggaagtgggtcatcagaaaggtcttcatccttgtcatcttcatgttgagtaggttgaggagaaggaaggggaagggttggctatactttctcaaagtggcagagacagaaggaaatttgcatataagtggacccatgcagttcaaacccacgttgttcaacagtcaacagtatttataaatcataacatcactttgtactccataagtatatacaaatgtaatttgtcaatttataattaaatgaataaaatttaaaaaataagactacaaggcttattttccacctcatcctggtaccaagaacagttgagattcttgtggggacctggtctgcttcatcctatgccctccatgaaccgcagagcatgcagagtcccgttctcatgcgggtaagaatccttagagataaaaatgttctggctgggtgcagtggcttacgcctgtaatcccagcactttgggagtccaaagcaggtggatcataaagtcagcagttcaagaccagcctggccaagatgttgaaaccctgcctctactaaaaatacaaaaatattagccaggtgtggtgtcgggtgcctgtaatcccaggtactcgggaggctgaggcagagaattgcttgaacctgggaagcagaggttgcagtgagccgagatggtgccaccggcactctagcctgggcagcagagcaacacttcatctcaaaaaaaaaaaaagttctttaccctcagaaaatgaaaattatggtacgtggtttttagttattactgaatacattttctgttttctcttatacttaccttccttcttttattcttctgccactttattctattttatgtatctataagtcaccttcaccttattgtaataaggacccataaataactaaccctcacaccaaatccttaaggtaggtgtccttgtttctacttcacaggtaagaaaactgagactgaaaataagtcaagaaggtgccactgaaaccattgctctctgatcccaaagtccattgctctcagcaccctttcctgttacagaagaaccactgtaaaattcttaggagcaatattgctttctagagactgcaaggaaattaataatgcaacgaatgttatatattgtaaacaatgtttgtttataagactaaagctaagttacaaacctggtaactaactatatgtgaccaaaatccaggcatgacagttcacaggccagttgttcatccccaccacagcttaatagagctgcgctgtccttcctggtgaggtttcctccaagccaaacatgctttgagctggctcagatgcccaggggcagaagcatgggcttccttcagagaaagtaatgcttctgtgtccagaattggttccttccagttgattttagtctcactgacttcaagaatgaacaggcagaccctcatagtgactgttatagttcttaaagatggtgtccagaatttgttccttaagatgttcagatgtgtccagagtttcttccttctggtgggttcgtggtcttgcttacttcaggagtgaaggcacagaccgttgccgtgagtgttacagctttttttttttttttttttgagacagagcctcgctctgtcacccaggctggagtgcagtgatgcaatcccagctcactgcaagctccacctcccgggttcatgccattctactgcctcagcctccgagtagctgggactacaggcgcctgccaccactcctggctaatttttcttatttttagcagagacacgatttcaccatgttggccaggatggtctggatctcctgaacttgtgatccgcccacctcagcccccccaaaatgcagggattacaggcgtgagccaccacacccggccagtgttacagctcttaaaggtggcgtgtctggagttattcattcctcccggtaggatcgtggtcttgatgggttcatggtctctgtggcttcatgagtgaagctgcacaccttggcagtattacagctcacaaacatagcacagttcccaacactaagcagaatcaagatttattgtgaagaccaaaagaacacagcttccacaaactcgaaacagaccctacagggttgctgcagttgggccggtggccagcttttattcccttatttggccccgcccatatcctgctgattggtccatttttacagagtgctgattggtccattttacagagtgctgatttgtccatttttacagagtgccgattggtgcatttacaaaacttaagctagacacagagcactgattggtgtgtttataatcctttagcaagacagaaaagttctccaagtccccacccgacccagaagaccagctggcttcacctctcacttccatgctgccaagacccctaagactcccagagcctccttcctcggctcctcactgccccttcccgccctactccatgcctccatgttttccccaggacccaaggccagacttcgctctgagctccctgacgctttgggctgaggccaggccctgatataccggtactgcaggaaaagaaaggaaaagaatccagaaggctcctcctgggcttgcacaaattcccctctgcttggtctgaagaggcacgtactaggagagtgcacaggtaacagtgaagcccccttacccagtgacccttcctcctggttaccacattccccagtggcgcctggtctatgacagctgtgtctctgcctccacagggctcagggcaggtcctggggcacttctcccgctggccctggatgagtcagcacctcaggcgcatgcagtaggtgctcaagactcagatccctcctcttgtctaggcctccagttggcccggattctgggggccctaggggaccccctccctccccttctggcttttgctcacacacactggacctgataaaagttccagcatgatttatcaaacaccctggctcctccaggctgagcccctgggggattttgaaaggaaacaggctccatgtgcttccaatccactccacgcagctcattgcgctattgttccgtctagcgggggatgtgcgggacaccctggaaccgttcgtggctctgtttaaagatgtttttcttagaagcaggaagttacgtcctgccaagaagaaatgaaaataaagccccgagggttcactcggggttcgctgggagccgcgctgagctgttgcagcgtcttggcccggccgaggaggaagtttaaaggggcctctgtctagagctctgaaggcaggcaaggcagcctggcagtgaccatcaggcaagtcagagacacacgcgagctctctgccccaggggccctagggtggcctcacagggcacagcagagccctccttctcgtgatcacgctgcggtcgggttggctgctccttcccattcgttcctctgaatctctgcagaggccgggggcatgtgggaagggcccaggaaaacctcaggtccaaatcttggctccttgtatgatagacgtgtatcttgcacaaagtacttcacctctctgggcagcagatgtcgtgctgtgaactctggggctgctcttccccctgccccaggctttcttacatacttcctactaacccccagcctccgaggaccaggttcagacaaaactgtctatcaaagtcattccctgggtgagtgtgactgaacaaaatcaacagcccagcccggtaatgccaagaggctccaggcctcccacagagggaggggctcctccaaggctgtgggtacaggtgttcttctggggttcccagggcaagccgggaaggagtactgcagagccccacggaaggatgcatgagcacaattgctctttcttgcctctgaggaaacttcttggcagacagtgtagaattcatttctacctcttttcattcattcaacaagtactgagagccttccatttgcttaataagaaaaaggggctaggactttgaaagccaaaactgtttctgtcatttactgactttgagatcttggaaaactatgtataagtctcagtcttctaactatagaatgggaataaatgtctctaccttttaggtccttgtaaagatcaagcactcttggatgtcccctgcactgcagggaaacgtggctgctgcctcttctggttgcctgcagctctttgcatagagttcatgttagccttggtgattcatgagtgcgtgattgtcaccaacacgtgtttctgagtgctgcagggtgggggctgcactttatgcctcaagctgtccccagattctggaagagtcccctgctcacttgagggtgggttgaatgaataacaaactgatttatttcctccatcatgtcctgagaggatacctgggctgcaaaaataaacatgcctgaggtctaccagatctgggcagcatggtgggacagagggacaactgaaggctgatgtcgtggtcacctcccagccagttgaagggctgctggggcactgacggtagacaagacatctgaagccagttagtaagactccagggcttacgaatactgcccagttcctgaaagtggcgtcctgcaggcaaggagagcacactgtccaagtcatagttggaggcacattgaaggcaccagcaccatctggccctctaccccagaacttggaaccagcgggaatcacaggactataggtttcagctcaaccaaagaaaggagttctcaacaatcagaactgtctgactatagaatgagctgccgaggtgttgagtttcccagccctgagggtttttatgtaaggcacccacagctatattctaggaatgtcttattggtgtggtgagtcatgaaccactggaggcttgattgcgttccaaagtgtggcacatacacgattggtggtccatgcgctgattttataaagcacacagaccatttttttaaaaagtgtgttttctttctgttaaattatatagattttgtagttattccctattttatgagaagtgataactgtttttcatttatggaacaacaaagttttattttaaacaaatatatcaaatacaataccatttataattgctcaaaaataagatacttagatgtgaatctaacaaaatatgcataggacttgcatgctgaaaattacaaatagtgattaaagaaatcaaacaagatctaagcaaatggaaagacataccataggctggaagatgcagtgaactgaagatgtcagttctccccaaattgacacacaggtttgatgcaattctatcaaaaccttagcaagatttatatttttttggcaggggaaaattattctaaaatttcaatgaaaaggcacaaaaacttgaataactaaatcaaaaaatttaaagaacaatcaagtgagaagaatcagtctatctgatttcaaaacttattgtatacctatagtaactgaggttgtgtggtattggtggaaggctagacacatagatagatcaatacaataggataaataaccaagaaacagatccagaaaaatatgcttatctaatctttgacagaaatgtggaagtaattcattgcagaaaagagccttttaaataaatggtgctaaagtaattagatattcataggcaaaaaaaaaaaaaaaaaaagccaaaaaccctcaacctaagtcttacaccctttgcaaaaattaactcaaaatacatcatgggccaggcacagtggctcacgcctgtaatcccagcactttgggaggctgaggcgggtagatcacctaaggtcaggagttcgagaccagcctggccaacatggtgaaaccccgtctctactaaaatacaaaaattaggtgggcatggtggcacgtgcctgtaatcccagctactcaagaggctgaggtgagcatcacttgaacccgggacgtggaggttgaagtgaacctaaatcacggctctgcactccagcatgggcgacagagcgagactccctctaaaaaaataaaaataaataaataaataatggacttaaatataaaacatgaaactataagacttaaaagaaaatagaaggaaatcatcaggatatgggatgagataaaggattcttagacttgataccaaaagcacaacccataaattgaaaaattgataaattggacttcttaaatataaaaacttttgctctacaaaaagcctattgataacttttttaaaagccacagactgaaagaaaatgtttgcaaacatcacgtatgacaacatcatagtatctagaatatgtaagaaagtcttaaaattcaatagtaaaaaattcaatcaaatcagaaaatgggaaaaagtcatgagatattttactgaggaagatatacatttatcaaataagcacatcaagagatgttcaaggttattagccattagggaaatgcaaatgaaaaccaccatggtatatcattacacacctatccaaaatggccaaaaaaaaaaaaatagtgaccatacaaatgctggcaagcatctggtgaaacggggtcactcacacattgctgatggaagtataaaacactaccaccactcttgaaaagtgtttgtcaattttttttacaaaaactaaacatccaactaccgtgcaaccaattgcagtcctggacatttttctcagataaaaggaagcaaatcgatacaaaatcttggacacaaatgtgtataatagctttattcttaatagccaaaaactggaagcaacccagatgtctttcaatggtgaataggtagacaatggaataccatcaccaaataccacttagtaatgaaaaggaagtttatttaacttttatgtctaacatgcgacaatctggatgaatctccagagagtgatgatgaatgaagaaagccaatctcaaaaggttattagacataccaaaagattttatttatgtgacattctttaaatgacaaacttacagaaatggggagcaaattagtgttgccaaggataaggggggtctgggagtggtagggaagtgggtgtggccacaaaaggacaataggaaaaactttgtggtgatggaatgttatgtatcttggctgtatcaatgtcaatatcctagtgctaatagtactatagtttggtaagttgttaccattggggaactggggtacaaggatctctaggtattatttcttacaactgcatgtgaaactgcagctatctcaaaataaaaaagcttaactaaaatctaataaatacaccaaaattaaaatgcatctgtgtaaagaaaataaagtaagtaaaatgacagtggcaagtggtatgtggaaatggcaaaacttttgaaggtgtcactccaataactggcacataggaagcactgaccctgaggacccccaggtaggatggtaggggatgtttgaagtttgaaatcctggcttgagttctgccgtccacacacaacagtgtcacgatgctgggcaagtcatttaagtcctttgccctattctcctcactgtgagataagaatgaaaatgaccttgtatgactgcttcacaataccgtcgagagtcaggcaaagaaaagtcattgtgaaaaagcagctatgaatatcaaggtctcttcccaatctgagattttatgaagttgtgttaaattaaagaagtcctgacaacactgtttatgtagttattacattaaaaatgttgtgtgtgggtcccggtggggaccttccctcctcacaccttcccttcctccctccatcctgtcttcgttccacaaatgtatattgaagacctactgcgtgtcagctcctttgctgtaagcatgagctacagagacaaatgaacatattccatactttgaggatctagtatgtagtctggtggggataacagacacaccctaagttgttacatggggaagtcatttccattctaccaaaaccaaaaacataacccctgagtcatactggtggattgatagggatgttgaaagtacatttgaagggctgagaaagaagaagaggagggggccgggcttcctgtctttcattgtccagaagtttccctagacttaattgcatggcaggagggctctaagagcagcaatggggaaagcgagtgaggaagagagtcggtgcttgtgccacttttgctactatcccattagccaaagcaagtcacaggccagcccagatcctagggggttgagagagattccagcactccatgggaggagctgtaagctcagtagccattggtgatctgtcatagaaaacgagcttaataaatataggtgcatctacacagcttgtctgactggagggaggtaggagccttccatgggtccccaggggccatggcccatgttaaggaacatggcctgcaccctgtccaacggaacccacttcctgcttcgtccctctgccagggaagtatattcaatccttggaaaacacagttcacagcgggggcctggatgcgagggatcagcacaagaaactcccaggacagtcagctgagcccattgagggacacatttccccttgtgctctctggtccctcagcatcctgtcctcacctcccccaggggagaggacagtcatctgccacctgcacattttcttaccaatgcccctgcttcttggaaaactccagggcactctagcaccacagtaagaaggtggtgttggaatgcctccctttccaacacatcctaatgctaagatcctggcttcaaacaacaccggcttacaagtagcgctcctcagccagggacataggggcttcctggggcggttgcctggttgctgacgtggctgtggcacagaaagcttctctttctgtaacttatttggagaattgaagagcaggttttgctaaagtcctgttgacagcaacttaagaaactgtgggatgaaggatccaggatgctccctgattctgttagcagcctcccccaaggataccaaaatgtgatctttagacaaacagagcctcattagaacacagacctctgccagagcatcctgctggccagctgaggcccagggagtgctcaactgatacagaccagattgctctggaagtcacaggtcccttgcagggctcgccagcaccggggcagcacgcccagacctagaaaaatcttgatttactaatgtgcccaggcaaggatgcgtcacccttccaacctcactcatagaggtgagctctctgacccaggagcaagcactgggcaattgcaaaaatgttttgttaacataatgggatgtactgtggagagggggtgattaaaagcagatgaggcaggagccagtgatcgggctccacctggggttcattccactctgggcagaggggcctgccaggctggtgtggggaggtctctgaatctccagcaccacctccagattggccagattcatgggaagtgttcccatgtgtggaggaacatgctgagcacaggatagagagttccaatgcggaagttcactgaacatacagatgccccagctgcagattttacatttgttggggtggtgactgccaggtccccctggaaccatcggtggtcacagatgggctgagtcccacccacttaatgaaagacttcctttcagagaactaaaataaagacacctggctgatacctgaccaaagggagcctcttctgctgttctctttacctgataagctgttatttacttctcaaaaccctgtcaccacccttgggccactcctgcaaaaagctgtccctcccagccctgcaggcatcatcacactgcatgtgtcacatggcatcagcacagatgattaaggtgtttctttgcccatctgggcattccctgtggggaggccatgttgattctgtgtacccactgcctaattcaggttctggcataaaataggtgctaactaaacacatttgatctataaatgtgttttgccttgattttataaataaatatttttgccttgattaccttgacttcaaaatagtagtggcaactcctgagcttggcgtacaaaaaaagtctcattgcttctaatatttaaatttaaaaatagcatgtgttcatactccttttttcctccccaggtagcatactccacacacccggggttggatcatccaaagactcttcaaaggctggcccaggccccagggcagaacagttactttcaccagcatctaccatggtgccactctcttctgagcacctctcctgctgttagacactgtttgggaagccctggtcagatgtagaaagttctgggtgcatggcaacagtgattcaggacccgagacagggaggggctccctgacctgcttagtgatgctcagcactggtggatcccccggggaatatgcctggactcccagtgttaaattattcaggtagatggctactttgacttacctacccacacatgcacatggagacacccttacactcacacatgttcccaagacatgcccatggagactagacagcaggtttgtcagcttcacccacatcttctcttggccacctaggtccttagttgggccaggttggccagtccctctctctctgctttcgcggcgcatctgccatcagggactcactcccttgttcgctcttgtcatctttccccaataggatcctccttaatccactccctaacattgagcctcaaagggggagggcttgagattttgacttcttcccagaaatcatgaggaatattggaaaacgtggctttctcaatgcagaacagtaaacatatgctgtaaatgctacaggcgcttgctgacatctggttacgcaaagggtcctggttaacatctagttatcaatgaacatctactccaaggtaatgtgatgttttcactgataaccagcatttaatcttactaaaataatttgaagttaagcctcaatggacaccacttccatacactcataacacacaatcacagagatcattgaacattgcagcatatctgcaaggggctggtgcttatgaacttcaaatcacaaaagacattgcttcattcttgttgtgaagaccattgactacaagaagagaaaaaccaaatgcatgaatatctatttgcctcattatttctgttcaattataacatagggttttagtaggagttttatggtttgaattgcgtcctcctaaaattcatatgctgaagccctaactttcaatgttgctgtatttggaggtaaaatctttggaagaaataaagttaaatgaagtcaaaagggtaggccctaatccaatttgactagtagctttataagacaagggtgagacactgagggtgtgcatacaggcaaaacgccatgtgaggacagcagggaggcagccaccagcaagccacagagagagagagtgtgggagaaaccaaacctgctactgcattcatctcaggcttccaacctccagaactgtgagaaaattaatttctgttctttaagtcactcagtttgtgctattttgttatggcagcttaagcagactaatacaggcataaaacctagacatcttgctcaaagaagatgatgtctgagatgcccggtgaaaaagtaggaggtaaagaaaacagatgcaagggtatttgaggcaggataatgctgtctgatgtttggagtgttttctgccagcttttatgggctcagaggatggtgatggagctaaaatgcaaagagaaagaaaagatcaacacttgatcatcaaatttcaaaatagtcttgtgaaactcattgaagtgacgataaggtggttttaaaaagctattttagggatatatttaagatgttgaaaagctagagctacactcacgaacaaaataagcattgacactgacaagagacagaatgtgaactcacatggcccagggctgaagctgcagaaatggatgctggtcccacaaagccaactgccactggaaacaaggcccaagctcaccctactgttggggagtggtccagagccagcttccctgtgtgaaacccacaagttcattgggcttctgggcacacagacacgaaatcaagcctgggatggttttcctgtggctgcagatggtgatgaacatttccctggggtagcgggagggaaaggtggtatccattcatcctctgggagccatgacaagctgtgctttggcctgggcacaggatcagtgatatctctatgggtgcaaaccgtgggccacaaatatgagagcgttgatagtgcagaaaacccaggggttgggtaaaggcaacagcaaaactaccaggcaggagaagtgaatgaagggacaggaaaaggcaactaaaacaaaaaccaataccactccatgggcacagtaggaaatttgtagcacatgaggaaagctgccactataacaatcatccaacaaacaaaacaaccaaaggattcactcagaggaaatgaagataacatagaccaatccattcactgatcaattcaacgagtgtgttgggaagctacacatttacagtgcccggtactgttgtaggtaccagagatgcatggacaagcagacagaagtccctgcctggatcaggggaaggagatagccaaactgacttatatagtacactaggaattagtaagtgctatagaaaaaaaatgaagcaaagtcaagtcaattcagaatatggggctggggaagaatggcttacaatttaagttggatttaaaaatgaagatgttaagcagttctccaagaaataatgaaagaaatactatcaatcaaaatgccagttgattataaaacaaaaattggtgaatatgaataaaaaaccaggtaatatggaaaaaataataagcccatgaaatgaaaaatataatctttaaaatgaaagactgaaagttcagtagatgagatgaaaataaactggacacagtaaaagacacaattaataaaatggaaaataacattggaaaatttatgcataattccacacagagatatatagcaagcaaagactattaaaaaaattggataaagccaaatgttgattaggatcaaatgttcattaggatataaggatataggaacctcacacatagctagtggaagtaaaagctattagtattctgaaaggcaatcttgcactagttaatttaggtatgttcctggagataggtagatgacatagatggatacagagagagagacagagacagagacagagagagagagatggatagatagatatctgtatagaagtaggaatagggatatctcaaagaaatgttcaccatccagtaagaggacaaatacaagtgggatttatctgtagtgtcaaggagatagagaagattggctgctatcactgggaaatgaattggtaacacttggttggagtacaccaagcattaatatgcagcaattggaagtaatgaacttgatgtgcacacaacaatatgtgtggctcttacaaaatacagtgtgacatatataacatatgattgtttccataaattaaaaatacatgttcagaaaacaatacatgttttaatatcacatatgaacaaaataatacacattaaatacacaggagtggttcttctgtgggagaggggagataaataaatcatggtaaaataaaataaacacatagataaaacaagtgagggaccttgtatacaaggttaatcacacacttcacttcatggcaactggtgatacgatcttggctcactgcaacctttgccttccaggctcaagttattctcatgcctcagcctcctgagtagctgggattacaggtgagtgccaccatgcctggctaatttttatgtttgtagtagagatggggtttcaccgtgtcacccaggctggtctcaaactcctgaccacacgtaatctgcctgcctcagcctcccaaaatgctgagattataggtatgagtcaccatgcccagcccataatgcttttataaagtaaaccccaaaaagattccttgacacactacatgagaacacagtgagaaggtgccatctatgaacctggaaacaggcttttactagacactgaatctgccatagccttgatcttggacttcacagcctccatagctgtgagaaataaatttctgttgtttataagccacccagcctgtaagattttgttatagtagcctaaacagactaagacttctagaaaagaattatacccagactgacagcagacttccaatcagccacaataggggtgaggagaaaatggaaagtcatcttcaaaggagctgtgagtctaaattctgcacccagttaactgtcattccagagtatctgaattaagggcattttcagacatacaagaataagagagtttatacttccactgaaagaactattaaaagataaattttagcaagaaggaaactaaattcagaggagtagaataaaagaagaaatgatgattaaagaaattggtaaactatgttggtagatgcaatgaattcttgatagaaaaaataaatatggaactaaagttatagagcaataacacagataatggagcaggggtgtgtgaagggcatttgaagcatgctaacagcagtgtcatatttggaatgaagacagatatactgaataattttggatactgcttgaaaatataaatgtgattttgtaaagtgaaaatcctagaggacaatccattccacccaattgtaatagaatctccaacttccaaagcaaataataggaaaaaggaagacatctagcattattaatccagcagaaggaagaaaagaaagtagaaaaaggcagcaaaaaaagaaaaaagcacaagaaatggaacacattaaaaagcagaaataatagtaaacctaaatgaattacattatctcactagaaaacacaatcaaattcaatttttaaaattttagtataagctgcctacaaaagagttaaccaaataaaactaaacacaaagtttgaaaataaaagtgtgtgtgctgagggaggggaggggataaaaagaaataatctaagcaaagtctggctctactgcagagttaagataatcaaaaacttgcagacacctagcaacacagcttcgatgtgtatttactgaatgtgtacttataagtacatacatatatatgtgactatgtgtatgtgtctgtgcacacataaccatataaatataggcatatgtgcacagacacatacaatgaattacaaggagaatttgaaaaactaatagctacaatgggagattttaagaatgcttttctcagaagctggttaaggtctagaagaaaataaccttcctcaaagggcaagaaggaaaccctcagctggtggtgtgacatgcacatgctttagagttgccctatagaatctgaccctcttctgatcaccttggactcttcattcatctgcccacccactcacagcaagacatgcttactgagtggccagtcagcatcaggcatggggcaggggatagaggtgagcagttcccagtttctgtcttcaaggagcccacagaccctcaaacagatggtcctattagagacaaccatggcattctggcaggcagagaataagaggattctgggaccctggaaggcttcctggaggaaaaatcatcttaggtaagtctgggagacaggtagggattggctaagtgaggaaggtggatgggattgtaggagagagggatagacccagaggtaagacagagcatggtgtgtcaggaaccttggctgagtatcctagaacatagcaggtggtgggggatgggaggagagcagcaggagaggtggcaactcagtcatgaagacagagaaacaggttgccttgatgaggaatctggactgtatcctgaaggtgatgggccaagaacatgatgggactagtaccagatttcagcaagaccgagatctcagtgttgcagaggggaagagactgcaggccaggtgggagcttttcttatgccatatgaggatattgtgtcattcaagtaatgactcattcaattgttttttcccttcaactttttattagaacttcatgtgctattccttttctctccaccagggaaacgaaaacaatcagacctgctctgttctctgtgggttaatagtttaggtgaggtggttgctgtactatgcaatgaaagctgcaacaaaactgattgcatgcaaggtttctggaatgattgagaatgagctgctgattctgcttgggggaaccagggagggattctttggggaggtggtatatctgttgagttctgaaagatgatgaaggtctcgtggaacacagttggcagaggaactctcacacgaaggcacaaatgcatgaacatgtcaggtcgtgggtgggttataagcgttaaatgatggaggtggtttcatcattcatatttttcatgtgtggaaattgagagctggagagattatgttactcgtcaaaggtcatgatcagacctgaggtctctggactcctagtcattgcttttttactattctgcctacatctctttctttattgttgtcttaattgtattaaaagaaatgataatggaaacatgttttttggaggaacgcatttggggcatgcgtattggtgtatgtgcctaagcgtgtgtgggtgttggtgtaaatttgttgcaaatgagtgtggttctgtgtactccgtgagccagatatccattaatcaacctctaaaaccatgtctttgtgggtgacagatgtttggattcaattataaggatgggaaagttgtttttccttccaaggaaagaaggtattatttgagagtgaaagtcagccatatataacattggtgatgaatattgttcattgtggaaacactctaaaagtggcttgtttaaaagagggtaatacattcagaagcttttaacccaccggatttaattgcaactgagtgccaaaataaaccccctgttaacaaacctccagctttccactgatttctcgcacttgctcccagctgtgagtgaagaatggaagtcagatgcttggattgcttgcagtgtgtataaagaattcacatgtgagtctttggctgctgtacaaacaggaaagtgtcctttcataaaaaggatgttcaggccagggcagagggaacccagggccacgtcgttatctgttgactagctcctgtccgttatacgtaatcaagacttagctaaataaccaccattaactgaactgaatatgaataattttcagttcatctaagactgattaagggtaaatatttttcataagtcatccagaataatataatccactattgctccaaagttgtcccaaagggcttcactttggttcaactcaatacaagtacattttgttcatttgaacagatattaaacaatacctaatagatgccagacagtacgagtatcccagtgctcctcctcagagagaattgtcaagaatcgggacaggcaaatgtagcaaaatcttttgttgccaactttgattcattaattaattgaaattttaaacactaaaagtagacaaaaaaagaaaaaaagagagggaagggaagcagtcagttgtcactgtcctgcccatggcccacaggggctgctatcttgagggtggcattcaacactctctgtggtccattccccggcccttgtgcaacttccctgctatctctcatctctgccatcttctaaccctccaattatacacagtatgtgtctttgtgaatgtcacttctcctgcctagaagctcacacatttgtcttcctcaatgaagcaccttcaacacacaggaaaatgtgacctttggataatcactattgccttcccagtacttagcacagatgctcaataaatattagctgaaggaatgaatgttcatatcatatatcctgtgggctctagggtcattatgatatccaaaaagtaaacatcaactatataggttttatattcaaaatcagcatacatctgtaagactaagaacatgcacaagaagagagcactagtgtgtctttattatcagctacaatagatgtcaagtccttcctcgcctgcatgctctagcaattgtgtgaggtggatgttttgtctccatggtacaaagcaagctaaggaagttcactaacttaatcagaattacccaacaaaaaaatggtgagatggagaattgatcctacagccatctgcctgattcaaccataccaccctgcatctgcatctggttggcagacccagtcatgctcattcctcggggcctgtctgccatgtgggagcagatgggaccctaccatgctctcagtgttggggtcattgctttcctcatgggggctcatactgtgagtgagcatcacgtggtgtacttgatgctgtggctgagatgaccttccagaaacccataaaaggtgcttggctgcccacgtgttttcagcccttctccagtttgaacagtcaagggtggtggtaggggggtcatatgtcatacacagatgctctgctggctctcctgggtgacttggggtgctctcacagggtcatcctgaggcctcatgcagacctaaaaaatctagcccaacccaaccagatgcctacatttctccctttggtggctgcagtagctgtctctctaccggttctcctcctgcttctctggctggtgcttctcagtctcctttgctgattgttcttgttctgcccacagctcaattgctggtcatcccaaggattctatgtactcaatgccatagatgctggggatacaaaaacaaatggtaccagggagactgttcattttcttcaacaagctgtggtcctatagaggaaaaggtaatgcaagattagattgtcctagagactctaatgggaaccgaatgtgttctgattgggacatagaggagagtcataactggagcctggaaccttttctgtagagcgagaagagaacagtggagctgagtaataagagatgagcaggttttaacagtagaggggacatgaggaaagcagagggcaatttatgcaggtgcagacagcactaggaaatgtgtggatgtctgaacagtttgtcaggtcaggggaactgtgagtagctcccagtgcctagagcattgggtgcaaaatgggtgtcgtggatgttggaagaaggctagagcagtcagcctggtctggatttggaagatccaagggtcctagcctttcccttgaagttagaagacatccactgaaggaattttacaaggggggaatctgatcctgtttgtgttttaggaatattattcatgatctgaagaggacatgcctatgggtttgggtaagagagaaaagagaaaggcaagattggaagcaggaagatccgtgaggagttgttgcttcagtggagggtgaagatgaggacgccttgaaccaaggaggaccagtggaaactgacgggtggcattttggatgagatgatccagaggtagaatccacagggcttcatctgaaattgagtcaaaaaatgaagtgaatgagaagaagtagcccagttaactactctgtccactttatttctggattggacatccgaaagaagggtattgggtttttttgttttgttttgttttgccatttaaaaaaaaaaaactcttagatatgcagaaaagtttcaaatatagtacagagcattcccatctatcccacacccagatttgtctgttccatctaatgaaccaatattgatgcattatctttaactcaagtctataccttgttcagatttccttagtttttgcccagtgtcctttttctgtttcagtattgcattcaggattcatgacctttagttgtcacatctctttaggctcctcttggctgtgatggtttctcagacttgaaaagtaccaatcacacatttgtttatttttcctttcaggtctatcattttttgcttcatgtgttatggtgctctattgtttgaacattaaacatttaggattgctatgtcttcttggttgatttactatataatatccctcctgtctctagtaattttcttagctttgaaatctatctgatcttaatatagcttctcctgctttgtttaatgtttgcctgctatatggtttccgtccttttattttcagcccatctacagtgttatgttgaaggcaagttttctgtaaatagcatatagttgagtagtgctttgtaatccactatgccagtatctgtcttttaattgatatatttagacccatttgtatttcatgaagtggttgatattttaggctttacatctgcctttttaatttttttgttttctgttttgcatttcttagttttattttgttcctgcctacctatgggctacttaagcagttttagagttatattttgattatatttagttttttgtgtatcattttgtgtagcttttcttagtggttgctctaagtattactagatgtatatagatatgtatacatatacacacataacttatcacaatgtacttaatgtcatcctaccagtttgcataaagtatagaaaaaataccttcttttaatttatctctcttttcttaatatagatgtcttatatattttctctgcatacattcagagccacatcagacagtgatataatttttgctttaatcggccaaaataatttagaaaactcaagaggaaaaggaaagtcaattgtatttgctaacatttttgcttatcatgttccttcttcctttcttatgttccaagatcctttcttttattattttatttctgttcagagaactttcttcaactagtcttttaggatatatctgctgtcaataaattctctatttgtttttgtctgagaatatctttatttctccttcatttctgaaggatattttcacttctgaagtatattatcacttatatgtggaattccaggttgaaaatttttttccttcaacacttgaaaaatgtaatgtcacttccttctggtctcaatggtttctgatgagaaatccatggtcattccaattgtttttcccctgtatctcaggtgttatctctccttgactgctttcaattttctttgtctttggttttcaaaaggctgactatgatgtgctttgatatggatttctatggctcatcctgctgaggtcacttagctttaaaaatctgtagatttgtgtcttttaccaaatttgagaagttttgggacattctatctttgagtacttttccagcgctattcttttcctcctcttcttctacaactccaacaacacaaatgttagatcttttgttatagtcccacaggtgcttcaggctttgctatttttgcttagtctattttctctctgttgttcaaattgggcctaggcagagtcctcaggaggcccaaccattaaactgtgggcagaataagaaaagccatagaggaaactgggaaatagcagccagaaaagcaggaagagaaccagtagagagatgctgcagaaactaaaaggaagatacttcaagaaaagggcagttggcagggctggataccagagaggccagagaggtgagaactgaacagagcctttgggatttgacatgaagcagtcattgtaagggcaaaagattgattgctatgacttaaaggctgaacaaaataaaaggagttattacttctattttacagactagaaaactgaggtttgggaagattatctaggtaatgtatccaatgtcattcagctagtaaaatgactcaacagggacataaatccagatcttccaaagccaaggccaggcttttcctctatagtgctggaagaaaaggaaagagtcagtgatgaatcagcccatccctagggtgaccagggatccaagataattccagtttgtgccattattttgatatacctattggcattgagatacagatagagaaacatagatatctggatctccttttttttttctctctctctgttcctctctctgtctctgtttttctgtctttctctgtctctcttccaccttcacttcgctctcaaactgccccaggttgaaggataaattacatggtcacactggtcactactcatcacccacctcccagtttgacctctagcagtatattgtctggacatccccatgcctgtctcaccgtttataaaccacctcaaatttagtggtgcaaaacaaaagtcaatttattatagtcatggatgttgtgggtcaataatttgaatgacatggaggggatggtttgtctctgctctctggcatctgggactcagctggaggctagaatcttcagatgacttcagtcatctctctgcctgagctgagaatactgcaagtctggacttagccagatgtctgttgactgccactctcttgggtgtggactcatggcatggcagctgagttgcaagaggaagtatcccacaagagaacaaacaaagtctcttctgacccaaccggaatcacgcagcctcacttccactgcattctattagttacaagcgagtggctacagcctgccaagattcacaatggaggggcctggcctccccatcctgtggggagagtggcaaagtctcattgcagaagaacatgtgggaaggagatgctgctggtgcaatctttggaaaatgcactcagccacaatggcccactcctttctgctcccagactggagcagaaaataaagagggagccaaggagtctggctagcatgaactgtagaccaacctcaaaaggaccttgctgtcaggtgtacaagcatcttaacagcaaaactatcatggggcaggtcagaaatgcagttatgtgaaggcacccaaagcgagcttccccacctgactgctccaaatctgctctgtagtgctggagcaatgagcacacagtgtctgctaaggtttgaatgtgtcccccaaaagcatgtgttgggcacttaatccccaatgcatcagtgttgggaggtggggcttactgcaaggtatttaggccatgagagctgtgccctcataaaaggattaatgctgattataaaaaaggcttgatgctgtgaatttgatcttttgttctctctcaccctctcttttcccttctgccatgctatgacagagcaagagggccctcacaagatgccaggccatcaatcttagacttcccagcctccagaaccatgatccaataaatgtttattatatattacccagtcttgggaattctgttttacagcataaaaaggaataagatagtgtcccagggaggactcttctctggaaagtgaattcatttcatggaaaacattttaaagcatataaagttaacttgcaatttggcaaacatgtagcaagtcacctgattaaagcagacacttactcagtgtggataagacagtattacacagcaggctctgtgggcattgctcattcagggacatcaccactgccttgtgggggaggaaatggaaactttgtcactcacccaggtatcatgctagggatggcagagctggactgtgaaccagggccgtccatgcacaaccgtcactcttctggttaactcctgctgtttcccagaaaaaaaaaaaaaaaacagctgtgtagactcgggggcctgtggggcggcagtgggtttctgggtgtctccaacccacatgtgtgtatgctggtggcgggggcttagtgtgaatgtgcacacaggtcccatagcctttcctcatttcaaaagccccatcacacaatcagcacattcaaagagaaaacacattttgggcttcagcagggacttcaaagggctttacaaagctctcttacttggtttataggtctccaaggcttcaagtgtttttggtttttttgcaccaagtggtgaagaatgtaattaaatgtgaacattaaaatgtcagctagtaattaacaaagaaaaagggcctgtgttgcctgccaggggtcctcctccattaggcaggcaggcccaagccagcaagcggggcatggccagcaggagcccaggcaagacctggacctcccaactaccactccagccccagaggaggggatgtgagagcccacagccctgggactaaaagatcaccacttctattaggggatgatcatccccacatgtctgctctgtgatggaacctgggctgggcctggggacactgaggccctgaatatgacccctgacacaggcacccagacataccagagcatcaccacggcttcatgaaaacctcactagaacctcatgagggcctcactaggcctccccagggcctcaccagggctgcatcaggacctcactaaggcctcaccatggctgtaccaggtctcactagagcctcaccagggctcatcacagcctcatcagggcctcatcagggcctcaccaggtcttcaccaggtctcaccagagcttcaccaggacctcaccagggcctcagctgggcctcgccagggcctggcttctctccggcttcccccctgccatccctgagtactgtgctgcagccccctgactgttctctgcctccccagggcacacatgccctacctgttcagagacttgtcctgcaattgtccacgcacctggaatacctctcctcactctttacctgagcaactcccatgggttctcaggattcaatttcaaagcagccgctggcggatgtcttctctgattcgctctcagtaagtcctcactcctttttctctaaaggcacttgcttccgttctttccccctctgaccacagtgtgtcattaaatttttcggtgtgtgtttattcttcagcctagccccatgtgggttccttaggacaaggactgaatctcattgtccctgagagagggcccagtgcccagtaccagtgtgtgcctgacaagtacatataatagtgaatgaggggcctggtcagggagacccccatgcctggatggtggcaacacagagggaagaagaacccagctgaaggcccctggggagttactgaagcactcaggacccaaccagtctgtgggtccctggagttttccaaaagggataggaaccaatcccggacactgacagcctttcctcttcaccatgaggatgatccccctgcttgttgccgtcctccagagcctgaggccaatggatggagcaagaggtggggggacccatggctatctgtgaccaatgcaggccctgctgttgtgtgagctccaccctgagcgggtggtggattcaggttcctgggtagcagatggcaggcaggaggctgtgctccatctcatctgtctgtcccttctgcaccccccccacccatagaccaccttcattcaggctggcctcccttggctggtgtgtgactacagcctccttccctcccccagccccaggcccccctgccctctggctctcctctggaagatctccctatccttcctgcagcaggcaatctggtggaagtcccttagcagctcacactctgccctgccctgtagtctgagctctttctcccaacacttcccatgaagaccaccaactactgggtcctgaacatgccacacctgtccccaggcttccacactttcacctgcacctctgccccccatactcctctatgcccacctggagagcccttcatgctttaagacagagcttgatccttgaacaccctcttcagggacctgcctgagctgcctctgctctcctgacagagcaggccgtgggagtgtaggtcttccctgctggcttggacaaatggagctaaaggggccgaaagtaggtctggcccatccaggcactttggttttgagacctgagcactagattgtgattcagaccccacttcaaggaggagatggggcataactcagtggttgtaactcccagtgtcacagctgtgtgtgctctgtctgcatttccaagagtgtgtgcaatcccagcccagccgtagcccgagggcgtccactgctcaccagaaccccgacccagaaggcctcactaagcagccttctgccccgctttctgttcctgacacgaatcagggagcctcaggccttctctggatgccgtgaatccagaatgtaaccagaatgaagaacagagaggcgtggactctctgtcctcgccacttcacatgataggtgtaatacacaaaagctgctcttctagggtgacagagagccacagaatctcagtgctaagtaagccaccatggactcgatattccagactcagccccttcctgggctacagaggctcctgcctcttctagtagggaaaggaggcagatatgagttcagggaaaggccttctctcaaaataaaaaagtgctgctttggcaaaggccctgaaagagtggcctgtggtgtgcacacacatcgacacatgctagagcttgcattagtccattatggaactgctatacagaaatacctgagactgggtaatttataaagaaaagaagtttaatttgctcctggttctgcaggccatacgggaagcatagtggcttctgcttctggggagtcctcaggaaacttacaatcatggcggaaggcagagaagaagcaggtatctcacatggcagaagcaggagcgagaaacaggtgggagatgccacacactttgaaacacccagatctggtgagaactctattaggagaacagcaccaaggggacagtgctaaaccatttgtgaaggatccacctccgtgatccagacgcctcccaccaggccccacctccaacattggggattacaattagacatgagatttggttggaggacacagatccaaatcatatcagagctattttctcaccaggaagaccaagtacctgaaggagagaggaagccctgggaagaggagaggggagaggaactgaggcacacagtgcatgcaggaaggccctggggtgggtgggagcatggggtgaggacatggtggggaggaggcttgggagacagagggacttggtggggaggaggcaggataggagaacagggctgtccacatgtggactctggccagggggagggattttctccatcccacaagcaagaataaacccagacgtagttgagcaatggacagccccctcagatgcaagcatggctgccgaatgggaaggggatgtgggcccaagacgggatggatttgggcaagatggaggtggtgaacacaaagtgaggtgagtgggtttggaggacgtagcaggtggtgaaattgtgagtctggaatgggttgggcacaagatgcggtacagcaagatgccagggaagcccctggtccctgacctctgcacctgctcatggatgttggtgcctctgtggacctcagatgagctgcttttcagcctgggcccatcccccatcagcagtaaagactcctaaaccctgatgacagagaatctctgccatctctccgttccctccttgtctacttcctccatctccagggcaccaaccacctggcctcccacctcctgccagtccattctcccagagcagccctttggggagtcatcactgtctcacttggcaaatgaggaaactgaggtttagcgaggtttgtggcctcagttgagtctgggcagcaacaactcggcagctcctgccccatggcatgtgcctgacgacgcatggaggacccccatgaaaacaagtccttcttgctcctgacactgaagatacaggtgcagacccccgagcctgctgagcagtggcttggtcacttattggcccaattctggcagctaagagtggccctttggccctcagacatgcttagtgagtcaggctgagtagctggggatcaagtgcccagaccaccagggcaatctgggattctcattggttgagaattgaaaagggaattattatttgtggggtattgtttagcaactatgccctcttccaaggcactgtcagagtcatacagtttcacagctctcctgttctatgcgaagtctgccttctttgcctgccctgtctttcgtgtcttgacatcgcaaagataaaactgtctagcaagtgcagatggccagcagctaacctcagcagggcctcccaaattcctggtgatggaagctgatgtgcagcttggctctcacactgcaggtaaaatgtcccatagcacttaaccctcactcccttctgttttattatcacattattcacctgagatggctttgaatcatgtgtacttcaacggcttcctgcatctggagagtgtcaggggagaatttcaaacatgaaatatgtcaggtttaaaatgcgccacatccttgcatcttcaaaccctcccacagctcatggcatcctgccctgaaaggccttttcccaagtcttccaggctggggctccctctgctctgactccaggttccaggagaggaagggattgcagagcctgagaggacaagccactcgatggccaatgcatagatgctagaagccaacatttgagttcgagcccactcatggctctgtgcctcagttgcctcatctgtaaaatggagataaccacactgccggcctcacaggaacacagtgaggtgaaccaagttaatgtatgtagggcaccaggagcagagcctggcctgtgctcaaatcaaatccacacatgagttgctattgtcacagacatttctcaagtacttgctaggtgtcaagccctgtgtaatttactttccgttcttatcctggctggagactcacaagtctcactaggggataggaggcaggaaaaacaggcagacgccagggtagtatctggccctgctctccccagtgggaaatgtttctgggtaggacacaggaaagaaaggctgcagatccttgctctcagtttttgccagtgagaggtgaggccagctggacttcctgggtccagtggggacttggggaactttcccgtcttacaagaggattgtaaaacgcaccaatcaggaactttcctgtcttacaagaggattgtaaaacgcaccaatgagtgctctgtaaaatgcaccaatcagcaggattctaaaagtagccaatcatggggaggattgaaaaaagggcactctgataggacataaatgaaacatgggaggggacaataagggaataaaagctggccaccccccagccagcagaggcaactgttggggtccccttccaggctgtgggaaccttgttttagatcttcacaataaaccttgctactgctcactctttgggtccacgccatgtttaagagctgtgacacgggcaaggtctgcaggtctgcggcttcattttttttttttttttttttttagatggagtcttgctcttgtcacccaggcaggagtggtgcagtggtgtgatctcggctcactgcaacttctgcttcctgggttcaagcgattctcctgcctcagccttctgagtagctggggttacaggcacctaccatgacgcctggctaatttttgtatttttagtagagacggggtttcgccatgttggacaggctggtctcgaactcctggcctcatgatccgcccgcctcggcctcccaaagtgctgtgattatagatgtgagccactgcgcctagcccgcggcttcattcttgaagtcagcgagatcacgaacctactggcaggaaccaactccggacacacctgggtcacagagactccttttaccgagggcctgaggcgggctgtcacttacccgcagctacacacgctagatcccaggcctcatttcctcctgctgggcctgttcagctgtaaacgccatcccagtgtctggcgtctgcatctgaccatacctcttcctggtctttattgcctttttctctttcattgaagtcaagggcacagaaaagtgcttgacgtgccctgcagaggccctgggtgccctctgaccacaaacatcatgacccagaaattctgctaactcagaaacacagttgcagactttctcctgagcttaggtaataattgcacttgtattttctctttctttctctctctctttttatttatttagttatttatttgttgggtcaggaatagcaatatgtcaacccaatttttttttaaatccctgagtttttattataagctacagcagtgtggggtgggagaggctgttgtgttactcaaacttgcattacagaataaaccttcctatgaaacatggtaggctgtttttggaactcaagcagctcatgagagagttgctttaggagctgtgttgtttgttttgatggcctccttggaagggcacttcagtggggcttgggtcctggacgcaagaggctgtgagcaggcagcttgggatcactgagtcccagcccccctctgtctccaggagagaagtgccctgatcaggggcatgaggagacagtcactgagcaattgtgcttgaactagctggacaaacatggaaggaagggagtcatatatatacaacatacccccattgtgcctggtctcttctaagtacctttatcatcatcctcacggctctgattttcttcatctaattaaagcacaaaggtatcatttacttgtgaaaggcacctacttagcagattgaagaacttgaattcaaacctagatttttccaaaaaaaaaaaactatgccctcataaagagagagccactggttggtgggggcgggtgggggtggtggagcgaagaagctaagtaaaacattttttttctggatacgtgagggaacaaaccaagtgtggtcatggggctgggggaggtgtcagcttcggacatccttagctcctcttccagaagggccaaggctggggattttggggagagacacaggagaggtgatggggaaggaaggagaatcagggctactaccctgctgtcccctggaacccgggtggcctggcggggccaagaggagaagtggtcacctgcctgttctcgcacctgattccctggtcatggggcagattccaggagaagccccgtattagtggatgctgacttcacggcttcccagatcccagatccccagccttccatgaagatcttacctcaagagactgtgcggttctctgaagaagtcagaggaattagtttcttggcctttcatctcacatcttggagaatctctaagcccacttgaaatcacaggtaatggggaagggcagagcacttggcatctgcaagagctcccaggaggcgcttgaagtgacactctccgtggctccatgggctcctgtgcttgctcccaggtgtcccaaggaaatcagagaggagctagttcctttttgaggttgaggtccaggctgtcagacacacccaggtcttggaaatttttaagcaaatcctgtagacctgactgcaactatccccacagaaattgcgcagggacagacatttgctctcataaatgccgctgtcagcccgaatgaagctcccagcagtgcctgacctaagatcagtgtctgtagcaatactaaacatccatgagtcaacccttaagccttcagtctcctctgaatcattctcttctgggccccccaaaatgtctgagattccttgggactgtctgtcttgaaagaggtctttgttccaagatatgagaatcaataaaataataggactaaggagtgggaggatgcttatcaagtgtaaatagtgtgcatacgtggccaggaaccctacagctaaggagtcaggctggaccaagggtgaggtggggtctgctggcattctgctcatgttgcccagagttttggaggttagttagcttttgtgggaatatagaatctaaggaattagtctcactgactttttattgtaatgaaagggcctgaattgggggctgaatcacttccctgggaagataagcgaagccactggaaagaacctcaggtctcggacgggagcagtgaagaaacagacaaaaagagagtcaacttctagtcctctctttacccctgccagagccctgaaccatgggaccagggggtgagggtcctggaatgttcagtgactccagaagccagttaaccacagagaatcatgcgaaaaacttcagccacctaatgtagctccactctgtgtccgccttgagtgcaaggggcttggggaacggggctgctaagtgaagcagtgtcacttccaggccttggcaatctcattgcagctggagtccatggaagctgcagtgctgaggccagcagacagcctgccaagcctgagatgcctgatgggcaataacaagaaaggggagctccagcctggcttggtgttgagtctctgggaagaaaaccaaacaaatccagggtgggttagctttctcctgtggttgtactctctctcctgcagtcaggagaaaggaaagaaagaaaaagagagaaagagagaaatagacaaggaaagaaagagaaaaagaaggaagggaaggaaggaaggagaacaatgaaagaaagagagagataaagaaagagaaaggaaagaaaagaggcaggaactaggaggccttgacacttgtgactgagccctgcagaagggtcagtgatgaggacctcagaaagtaaagacctcacctggaccctgaagctcacttccaggtgttctgctgtgaagccaggactggacaccagagcatccactatggcaagggctctactctccaggccacctgaaggtatcaggggtttctgacctggagacgagcaaacacagtgggaggtgctgctgcctggtgatatctgaggtgctgatgtggagggaggacaggcttcttccttatgacacccagagctcaagttggggcccacagggaccattcaaaaggaactcaagttcagtgtaatctgagtgcatcaactgggatttaccaagagaagcagacccagtaagagatagatgatttgttgttgggcattgagctaacgtcgtcctgggggtggttttgttaagtggtctctgcaaggttatggtccccacagctgatgctggagattgaagtctatgaagtaggccatcaggaagggaagagcgtgagcaagttggaacccgcaagcaggagggatggcggagaccatgcccatgcttgttgcctctgaccatggtgacaagggtgtcctgcagaagcagggactctccctcacagggttaaacacatgcacctgggccaggaggcagagaaggtggcctggctgtggcttcatgccactggggtgaatcgccagaccagcaacaataggtgtgtgctgctatttccccatcgactttccaatctcccaagacttttctgtgtggctgactctaaccataaacagctgatggtgagcaccaggaaacgtagtcctggccagccaacctgatatcagaagaccagcacagcaaggaaggcctgtctcacattcagagctgccctgagtgggatgggctgttctgggggaaggctgtcccctcagtagctccacgcaagcagcagctgcacagctacccagtggggatgctgtgctttggctatgcaaccatggtgggagggggcctttccttcatctggcctggaactcaccgtaaatgtcactcctttggggtggcccactgtgaaatgaaattgccctcataaatgctgccctgaagaggtctctgggtgtgggactgagaagaggctctaggaatggacagtcagggagagcagagggtctctgccagccctcaccataagcatgggcctggtagagtggatcatgcagcccaggtcctagccccgatgtgtgggtatagcagcagctctgggcacccaggatggcagcctgagtgcaggccttagaatccaggctcgactcaccaccccagtgggtaggtcagctggctccatcctctcccctccccaggaccagctgaccataactcagcaggttgggtgctggccagtcccggagcctcactcctaggtgggaagtactgagaagtccatagctgttggaaaaaaggcctcaaaaaacccacagcaggaaccccagaaaggggctctactagtgaggacatcaaggaaactgtggaaattacttacgcatttctcaaaaattcaaatatggcactaggccacctctatgcacaataaaaagatggtcagccaaactggccctcacctggttctgctacttccccacttctgctgcttccccattgcaggaagatggcagctctataaacctcagtttctccatctgccaatcaggaaaaaaggctaatggtcagtgccccttacagtactgactacataatatgctatgcacagcctagtgcaaaatcaaaatgtgggccctctgctcaaaagttaagaatttcaaaaccacaataacagcatgttacaccaagcacagggctcttctaagcatagagcacagtagggctgcacaaggaacgccatgtgtgaggcaggccctgccaacacactctctggtgcctctaccgtgtttcaaaagcttgtgtatgtatttatcatgagaatggaggtatatatcctgcagctcatgctgtaccttagacatgccagtatgggtcgggatatatttagtctctggaagaattttgattcaagattcctgggtgaccaaggacccaagttggaggcaccctagttggggcctcgacttatgaaactaaaatcttatttaaataaaatgtccttcaaatgcaagctattattacaaaagatcctttttaaaaactgtgaacataagaccacagagttgctaaatgtccacagaatatgcatatcctgaaaagggaacatttgtgaactcaatggggatcagcagactctggccagtggggccacgggcatactccccagcctccacttggggctgtaaaccgaaaataaaattcaaagaccctcccactcctgcaactatctgaatgtacttcctccttcgccaaggcactctaaaatgtaactttaaagactggttcaggccatgactggaagtggggattgtatatgcctcattttaaacctcccccagcattaacatcaacacaggccttaagcctaataagaaacagttactgtcttctctctaaagcctgctacttggaggcttcatctgcataaaacccacgtctccacaacctcttggcgtaacccagacatttccttcctattgatgatgactctttcaacaaattgccaatcagaatatgttgaaatctacatatgacctggaaacccctgcttcgagttgtcctgcctttccagatggaaccaatgtaaatcttacatgtattgattaatgtattatttctccctaaaatgtataaaagcaagctgcaccctaccaccttgggcacatgtcatcaagaccgcctaagcctgtgtcgtgggcgcgtccttaaccttggcaacgtaaactttctaaatgcactgagacctgtctcagatatttggggctcacatggcctccactcttgcccttggcctcatctatgccatgccttgctccagttctaccaaatcgcaggggcttccctgaagactgtgcattgcctcctatctctgggcctatgcacatgctgttcccctgcctggaatgccctcgccattcggaaacagcacccaaaacaccactgtttcccttcgcaattcaactcccacatctcctttgggaagcttcctggatttcctgggaatggttgtaaataataataataaatatatgacatttattcagtatcgattatgttttagtcactattataagtaatttacatgtattaactcatctatacttcacagaaaccctcagataaatatactatatcctatcattttatttaatattaattcccattttactgctgctgacaagacccaaagaagtatagcagcttagccaagctcacacttccaggcagtcttgctccagaatgtgtgttcttgcctgctccacaattctgccactctcagctagttgctctttgtatctcatatttacctcctccgtgcacatatcccattggattgtgaccatttgcttatctggcttttttcttgagtgcagggactttgttctattcactattgtcttcctgtacctatcagaatgactgatactaaaaggttttcaacgagtattaacaaaacggaagagcttccacccaaatgctgatgcatcgctttcccacatccaggcctcctccaagctgtggcagactgcagaccatcagctggcccatcgcgcttgagcaagagacaaggccaagtccccagcgttctctgctggcctccttctaaaccagacaccggacacagattcttggagcccccaccgtttggttttaacaggactgtggcttgccctcaaagccttctcatggtgatcagacctaggtagatgtccctgccccgtgagctgagcaggacttttctgaatccagagagagatttgtgcctatgagagaacatgccagggagtatgctgcctccaaagatcgggacatgcacctgctgtgaaggcagttcttgtgggtgcggtctaggagtctcctcttgcactcctgcttcttggcctgtaaaatcaaactttccttcaaggccttactcaaacctccttctcctgtaacagtcagattcctagtcagcttccttgattccttttccacctgcctcctcacattgtgaggccatggttctcagctgtgctgaagtaaattatgaggtcacttataagtgaggccttacaagtgaccataaccttgcttgatttacaaacataagcaaagcttaacttgagctatttcttgtaaatgcctattttaaagaaaactgaggccaggcatggtggcttatgcctgaaatcccagtgccttggaaagccaaggtgggaggatcacttgaggccaggagttcaagaccagcatggacaacaaagcaagaccccattcctacaaaaaaaaaaaaaaaaaaaaaaaaaagagaaagaagaagaagaaagaaaagaaagaaaaatgaaacttaaggataatcaatcagaactgtcaactcactgacaattatataatgagaaactttccaacaggataaatcaaataaggcaactctataactgtagcatatcaacttgtatgtatataacttgtatgtatataagtgtaacaaatcaaacatttcctttgctttacttcttcattcaccatttaaaaaagcctttcccttgcatctcctcagtgcagcctgaaaccacctttggattagtacttccaaattcatgaattgctgcttgctccattaaactctttaaaattataccatgctgcagtttaccttttaacagccccattcccattagaaactccttaggagtattttataaatactgatgtccatgtctcaccctagacaagctcattcagactgacattttgttaaagccccaaggtgatgccaacatgaagacagggttgaggacctctgttctggagcgacctatgctaggacatccttgtactgaccacccctgccctatgagggaattaactgccttgttactaagtgcacaaaagaagtgctcaagaaatggtattgaaatgatagtgattagaattatgaatgctcagtttctccttattgataaatcctttcatatttgagaagctttaatgcatgggaaaataatagtcttacaatttgtactttgataatgtccagtttattcattgtataaagatatcaaatagcatttctttgaacattaaataagcatccctccaagtattcagttcacactacaaatacatcatttaacaacttaaatttccctaggcattcaaatatggcaattataaatattttgtatcatcaaattaaaatcaaaagttcaatacaacagattttttgaaggaaaactttgttttttcttttgtttgtttgttttgtttttgagacagagtctcgctctgtcgcccaggctggagtgcagtgggacaatctcggctcactgcaacctctgccttccgggttcaagcgattcttctgcctcagcctcccaagtagctgggactacaggcctgtaccactatgcctggctaatttttgtatttttaatagagacgggggtttcaccgtgttagccaggatggtctcgatcaatctcttgacctcgtgatctgcccgccttggcctcccaaagtgctgggattacaggcgtgagtcactacgcccagcctggaaatcttaaaataaaaaaaaaatcttacaaaatattacagtggttacaaattgatgaatgggcttgtgcaaaaggacccagttagaaaaaggttaacccaaggatttcaatgcatgctttcttatctctattatcattttagtttttaagttctattatcattttagtttttaagttcttattcttactctttccctgggtagcagatcctagcccctgccctatctcaagttgctcagactcctttctttgtaaagattttatcagtcttgaataattataggactgttacaattatatagttcttatttgttgcattttgacagtttgtggtttttgagaaagtggtttattcttttaagttgtggaatttatgagagtaaagttgttcataatatttccttattattcttttagtggctgcaagatctgcactgatattcctattttatttctaatattggtgatttatgtcttttttcctgttagaggtttatcaattttattgaattttctcaaagaattagctttttgtttcattgattttcctttgttgttttttttaattttcaatattactgatttctgctcttacctttatttcctttcttcagcgtgctgtgggtttatttggatccttttctcattccttgaggtaggaatttagattattaacttgagacctttattttcctgatgtaaggatttagtgctgtaaattttcctttcagcactgctttagctgtgtctcatatattttaatatactttaaaaattttccattcagttctatgttttttttttagtttcctttgagacttttctttgattcatggattatttaatttctaaatgtttagagtttcctttttttctttctgttactgatttctagttgatcgtattgtgatcagagaataccctctggatgacttcttttaaatttgttgagggcattttatgggccagagaataatctatcttagtgaattttccatgaatacttatgtttaaaagaaaagtatattctgctgctattgggtaaagagttctgtgtatgccaactagatattaccggctgactgtgttcagatcatcagtatacttgctgcttttctgtctagtattcagttgctaaaaggagggtgttgcagtttttaattataattgtgaatttgtctcttctttcatttctatcaatatttgtttcacgtattttgaggctctgttgtttggtacatgtagatgtaggatgttatattttcctggattgattcttttatcattattttattataatgtccttcattgtttttagtaattctctttgctgtagagtttactttatctgatatagacatagccagtcctgccttttttctagttaatgtttgcagggcatatattttcccattcttttactgtcaacctacataagccattgaatttgaagtgaatttcttataaacagcagatagttaggtcatgctttttattccactctacaaatctctgctttctaatttgtgtattaagacaatttacatttaaggtcattatatgttctcaagtctaccattttattatttgtttttttctgtttctcttttcttgtcttctgataggttacttgaacattttttatgattccatcctgatgtatttatagtgcttttacgtgcatctctttttatagttttcttagttcaggatattgcaatatactaatatgtcttactgtagtctactggtatcaatattttatcactttaaatgaaggattaaaacctaacttttattaagtcgctttactttcccccacgtttaaatattattttgcgtactagatagtgttatagcttctatttcaatcatcaaatataattgataaaactcatcaggtcagtctgttgtatgtactcatatttctgctctttcttttgttctacctttctgatgctccaatattcctttctttattttttattttttattttttttgagacggagtctggctctgtcgccctggctggagtgcggtggcgcgatctcggcttactgcaagctccgcctcccgggttcatgccattctcctgcctcagcctcctgtgtagctgggactacaggtgctcgccaccatgccccactgattttttgtattttttagtagtgacggggtttcaccatgttagccaggatggtctggatctcctgaccttgtgatctgcccgcttcggcctcccaaagtgttgggattacaggcgtgagccaccgccccggcctcctttctttattatttactttctatttaaagaacttcagccattctttacaggtaagtctgttgatgacaaattcttctaaatttttctttttctgagaatatctttacttccctttctttctgaaggatagtttctctggatctagaattactagctgacagttcttttatttctatacttgaaaaatgtcacgccacttctttctgcctccattattccagatgagaatcccactgttactcaaattggtggtcccctttaggtcatgtattgtttcgtcctggctacttttaatttttttttcttttggttttccaatgtttaattatgatgtgtcttggcatgaatttctttgggtttttcaaatactgagttggatcaccttgaatctgctaaatctggaagcttttccacaattatttcttcaaatactctttcattctatatttcttctttctttctgggatttcaatgatgtaaattttataacttttatttttgtcccacaggtctctgagtctctgttcattcctcttttttttttagtttattttatttctgtccttcagattgagtaaattctttcgagctgtcttcaggttcattgattctactgtcatctccactgagctcattcagcacatttttaaaattgttgttattgtatttctcagttccacaatttttagttgattattttaaatactttctattgttttgctgaaatgttttattagtccgttcgtttcaagaaaatccgtaattgattgttgaagcatttttagagtaggtgcttttcagataattccaacatctgattcgtttcaatgtgcagggtcagttgattgccttttctcattcaagttgtaatttttcagattcttagtatgatggataatttcagttatatcctggaaaatttgactattctaacactctagattctatttaaatatattattttaacagccaggggctctgtttaggattagcccacaggtctgtcctacttttgtcagctgtggttccaatgacaatataatttccgagacctgtgtggtgttattttggtttgcttggtttatctcattttcccactgcttcctgctggtgctgcccgaggggacagaagacgttgagctacctgacaccaccctgtggggaaaggaagtttccggactgccttttggcagaatctcccttgcttttgagaggatagagagggctttctggttggccacttgcaaaaggatctccttgcccatgctgctttgctactgggtgtctgtcatgtgggagaggagtcttgggcctaaggagaaaaagaggcttcctgagctgggagcatggagttgtagggcctctaccccagcattgccttctgtggtctcttgggagagaagagtctcacaggcagcagggaaggagagtgctttccctgactacctattgtcagtggggctcctgattgatcccatatgaagtgccactgggctcgcctgctgtggccatcagaaggactcccgttcaatctggggaccttcctacctgggctgccttctgttgctgagctggggtttcagaaacactatgcctgaatctccttcttcttcttttgggtgatgggaaattgcaagtcaccctgactctatgttgtccctccaacccttaggtttctaatcagtttaccttcctcttcccacctttcagagttcttttcattattttcagggtttactgttgtactcggtggggaggaatagggagaaacaggtatatttcatcttgtccaggccagagtatctagttttctttctgttatagatttctagcttaattttctcataataagagaactctcataaagcaaagattttatagattcagtatgatggcatcaagtccataagtagacttctttattgatagaaaaaaggaaacaccagtgacaacatagagatgtgtgacctcctgactattgtagcagtggcagaaggaaggcagatagaagatggttatcatggtgatatgaaagatgggagcatttatgagaatgtaagagcatttttacttaagaaattactatgaggagaaaagacagtgatttttgtggtgtctgaaatgatgctaactaataggtatggccaactagaggcaaagaattattgcctttggaatcctaaaactaccctcaaattttccttcctattctgctatctgagagcttatgaaaatttgagtcagcttttagccttgacatataatctacaaatgtcatagctgttgcatacttttctctataaatgaacctctttctatatccttgtattaatagtgtttgtaactagatggtatgagactggcaaaacaaggcttatctaccccaaataacagatattctcaggagtgccagtcagggacatgtccatgaaattcatgttcttataaccaggaagtgggggctttgtggacaggtactactaaaataattaagccaaagctaacatttaaaattctttttccaaacaccctcaaatcttttcatttctcactgtgtggtttgcagtttactctggctctttttggtggaaaaatttgctcacttacatatgaacctcacatctcacatattaataggtttggcctttcagtgatccttctgtcatatatgcaatgtaaaatttaaagacaattacggatggtagaaagagcttcttgaactaatacacaaatgaattaaaatttgtatggaattataatcattaattaatttaagaaagttccaagagtaataagaagccaaagaaagcacatagtcttgattttctgagaaaaatttaaactttttacatttaacgcatctttgtacattggctaaaatgtaacttcatggccctaaaactaaaatctttgctagaaaagatggagttgaacataggccgactgagctgccattcttattagttatgagagtttaagaagacaacaaggaccacatgtctaagagacaaatggccattttaaaggcatgatggttcttggcaaaagcacatgtgactgttaggtgttgccaaatgaaagtgtggctgaaatggcccaagctggtttggtgaaaattgcaaagagacagtatagccattagggtcattcacaaatcttccaactttacacacacccctcccccaagtgtattctaaaatttgcttccctgctcctttaaagttatgtgcagctaaatccagcttggccagtgaaatgtgcaaaaccccttaagatccagcaaagagtgcactgttcctttcccccatctcactgataataaaagtacatatacagacatataaaagtacatacagagatacctcctggtaacctggcatccctgagaaattgcaatgagcaaaactccctttctttgctgggcatggtggctcatgcctgtaatcccagcactttgggaggctgaggcaggaggatcccttgagcccaggagttcaagaccagcctgggtgacatagggagaccttgtctctaaataaaataaataaataaataactcccttccctaaatttgacatgtagcatgagagagaagcaaacttgcattgttgtcttcgtctgtttgggctgctacaatagaataccatcaacctggtagcttataaagaacataaacttatctctcacagttctggaggctgggaaatccaagatcaaaatgctggcagattcagtatctggtgagggcccactttctggttcataaatgtccatcttcttgctacagcctcacatgacagaaaagaagagggagctttctggtgtctctcttataaagtctctgctcttatgacacaatcacctcccaaaggcctcatatactaataccatcaccttggggtttaggatttcaacataagaattttggagggacacaaacatacagaccatagcattctttcccctagccccccgaagttcatgtccttcttgcataaaaaatacattcattttatcccaacagccccaaaagccttaacttgttgcagcatcaacttgaaagtctaaagtccaaggtctcatctaaataccatctaagtcagttatgggtgatcctcaagatacaattcattctgaggcaaattgctctccagctgtgaacctgcaaaaatcaaacatgttatgtgctttcaaaatgtcatggtgagagaggcataggatagacattgcatttccaaaaggggagataagaaagaagaaaagagtgacagtccaaaacccaattagacaaatgcctttcaaccttaagtcttcagaatcatcatctttggcttgatgctctgccctccaggcctgctggggcagaggtcctaccttctagacctactgggtggggctctgcattcaagacccaccaagatgggttcttgcctctacggctcttccaaacaggagtcaagccctcagttttctaggcagctccacctcagtggcagttctgtgcctgggccctgctcctatgggagtcctctgcctaggccctacagctctccagtgttggggttccaagctcttggctctgccagaagaccctcttctttgaagtctaggtggagatatccatgccccctggctccacggggcacagcccacaccaaaccagggctcaccaaagctacacctggggtagccaagaagtgcagttccagagtgttaaaacacatgcgcagtggagcctgctatgtgaggcagtgctgggtaggacactgaagtcctgcggttgccagtggcccttcgtttgcatattttcattgtctttaacaatagctcctgtcttctgttgagacagctgattaatctccttccttagcagtcatttgaccccatccttagtgttctcttctgaccatgctttctcatttttacaatacggattggctgagaattttccacatctttgaattttgcttcccttttgatgaacaattttgtctttaaatcattttcctcttcttgcattttactataaccaatcaagagaaaccaggctgatcctcaaacactttgcttagaaatttcctcagccaaatatccagttctattgttcacaagtttactctccacagaacactaagatatgaacacaattcagcaaaatcctttgccactttatgatatgttcctcttctctgtctgagacctcttcagatggcttttatcatccatatttctacgaacattctgatcaggattatttaggtattgtctaagaagactgaaactttatttatagttatcctttctttctgagccctcaccaggatcacctttaaaggttcattcacagcaatgaacgaaactttctaggatgatgaaaatgctctgtatctggatttaggttgttggttatgcaggtttgtcaatactcctcatttatatgcttaagatctgtatatttcactacatacaattttaagatatttttaataggataatttgtcattttagatatcatgaatcatgatatcaggctgaaggctttttctagcattcacttcaaaactcttccagcctctacccattacccagttccaaagtcccttccacatttttaagtatttgttacagcagcacccccactttcagtaacaattttctgttttagtctatttgagctgctataacaaaataccataaactggacttataaacaacaaacacttattttttgcatttctggaggctaagaaggccagatcaaggtgccagcatattcagtgtctggagagggcctgcctcctttttcatagacagctatcttcttgctataacctcacatggtggaaagggggtgagttctgtggggcctcttttataagggcacagatgccattcatgagggtcctgccatcttgacttggccacctcccaaaagcccaacctcctaatactattaccttgttagactttcaatatatgaatttaagggaggcacaaatattcagtccatagcagttgtgttaaatctccgagatatgggattatttgttactgaaatgtaacctagaccacactgactgatataaagtttattcaacagtcttggtgaagaaaactgttatctgctgagtaccaggaaaaaaattcagtgtctcagaaaattagtagttaattaagccctatcttcaataatttctttacttcaaatttgtaataattcaaacatttaatccctttaaatgtttgagaacttgcaataggtctaatactgtaggtctaataggtctaatatattcaagtaggaaactggcaagtaacatccaagagtcagttggccacccatgcttgaggaggctaatgatcccccagttgttggtaggaacaaaatgaaacctccaggatagggagtggacaccaagtgatagcactcagacagagatttgtcactggggtgggctgtcaggccccacctgagtcccagaatcttaaatttcttcttcccaatccccagtgctgcttgacccttaaacagagcattaatctatgctcacaaagcatgtgcaagtttaaagcacttagaaaaattcctggtacggggtgagcatgctatggttatctctcagcatcagcattattattatttttattgttattgcctcaatttttggatgagaaaactggaacttagagtgattaattggtccaaagtcctgagattataagtgactgagctaggatttgaattaaggttcaaattaaatgctctttccacagcatcagctacctcttcagtagcttatgcttgagctggaaagtgacttctcccaaaaacaaatgtcaaggagccaaaactgaaaggcaggtagaaatggctgtacaaaaaataaattattgagaccttaaactaaagtttggtccagatttatgcttctggccatcacagaggaactggctccagacttgtccttctgtggaaaataactataaaactggatgacttttcaagtactgaatacagaaaacacaggcttgtgattttgaagagaaaagaatcacgtgaagtgagcttcagtttcactgaggttttctgcctggaggcagcttcgagctgccatacagggaagtggaagcagagctcaagcagaggatgacgaactgagtgaggaggcaaaaatcccaagtatgggagacataagctgctgaagcagccggaatctgtgagatagagtactagagaaaaggagtttccaagagatctccagaagtctccacaagttttctgtaggtcttttgtgagggatggactacaaatggccaaggtgagacgtcctaaggcctggatgcgatcgtgtgctatggagctgaaagcttgatagaaataccaaaggtgtgtaatgctgggagatgcctgagttcctgctgagtgggagggcaggaatagctgactgcatcagagattcactggcaccccagaaaagccatgcctaggagcaaggacagccctagagtaaaggacttgccgtagggctaagttaagaagccaggttaaaaatctaaacaaacaagcaacaaacaaagaaacaaactacatttacacccttcctaagagagtcagaagccaagcctgatagacagaaaatgatctagtggcaagtgaattgcctgccaaacaaaactcaatgccctatgaggaaaatgacataatttggataccctataacatgtcatctaaagtgtttaacattcagtaaaaaaaaaaaattagacatgtgaagaagctagaaaatatgaccctttatcaaagaagcagaaaaatgtgacccatgatagagacaaataaggagtcactagaaattgaattcaaggtggttcagatgttgaataacaggcaaagttgttaaagtagctgtgataaatatgttaaagccgttaaaaatgtggtcataccgaaacaaatgtgagttctaaaaatgaaaagaaaaatgtcgatattgagaaattcatttgataggaataacagctcacaaaaggctgctgaagaataagttagcgactgtgatgcagatcaattgacattttcaaatccaaagagaaaaaaacctgaaaaataagagcagctcctctgtcacctgtggaatcataccaaccagtctaacataggtataattagaatcccagaaaaatagaacagagaatgtagcagaaaaatatatttgaagaaataatacctctattttttcaaatttagtgaaaagcaaacatacagctttaagaagctaagcaaaccacaggcaagataaatacaaagaaatccacatgtagtcatatcattgtcaaaatgcaaaaaactaaagataatgtgaaaatcttaaaagcaattaaagaaaaaaggcatgttacatctagagaaaaatgtttcaaattatggctaaatttagtcttgtaaattatggaaaccagaaggcaatggaacaccttttaacttctggtgaaaaaaaagaagtgtcaatctacaattttacaaccaatagagctattttttaaatgaaggatatttacatataaatgaaaactgatagaatgtgtaatcagcagagttgtcttataagaattgctaaaaaaaaatattcttcaggctgaagggaaatgacaccagatagacacttgtatttgggagtggagagtagcaaaaatggtacatatgtgggtaaatataagagaataatatattcttcagtatttatgcaaaccttaccagaatggaaaagaaaatatacctaactatatgttgattgcaagagatggacttgaaatataaaggcaccagagagtttgaaaataagaagaagaaagatgcattatgaaaacaggaaacataagaaagcagttatgtgcatattaaaatcagaaaaaggagacttcaagcagaaagtattttcagagattgcagaggtctaattttataataataaaaggatcaactcattaataaggcataacaattccaaaacaatatgcatcttaaaattgttcaaaatatataaatcaaaaattgacagatagagaaataaaaaactgtgcaattttagttggagattttaacaccccttttaaaataatttataagactacatgtacatagaatactataccaaaaaactgcagcacatacattgttttaaagtgcatttggaatattcacaagacagatcatatctgtctataaatgcctataaaatgcttcaataaatttaaaatgattaaaatataacaaagtatattttctgactacagtgacattagaaatcaataacaataaatataaaaatctcaaatatatgaaaatcaagaggtatacttcaaaataatctacctctggggaagaatgaaaagttagaatttagaaaatatttttaaccaaatgacactttaaaacacaacatatcaaaatttgtggaatgcaattaagcaatgcttagtgagcaatttataactttaaatgctaatattagaaagaaggaagaattaaaaatcaatgatctaagtttttacctaaagaagctcaaaaaaggagaaaaggtaaataaaaggaaatcttaacactttgaaaaagaagttgaaaagggttatagccactttggaatccattttgaagtttcttctaagattaactaacagtggctgagcaattggactcatgggtatttacctaaaaaaatgaaaaaatagtttcatagaaagacttgtaaaagaatgttcatagcaccttttttcaactttattcaaaaaagcataatactagaaataacccatatgtttaccaacaggaaaatggaagaattgtcctatattcatacaatgaactactgacccatacgtcaacatgaatgaatcttatagacatactgttaaacaaataaaacccggtatgacagaatatatactgtattatttcatttttctgaaattcaaggacaaaactaatctatggtaattatattagttattttcgcataacaaattatgccaaaactatttggcttaaaatagcaaacgtattatctcaaggtttctgagtcaggagtcgaggcacagtttagttggatgcttcagattcagatctccagcaagcctacttcaaggcgttggctggggctgtggtcatctcaaggcttgcttgggggactgtgtgctcccaagttcactcacgtggctgttgactggagacatcgcttctttgccatgtggagctcttcttatgggtctctcccatggcagttggcttccactagagctggagctccagaagagagtgaaagaaatgatgagaaagacagaagtcacagtgtctttataacctaacctcagaagggatagcaagttacttggcactgcacacactctggtggagggtattgcaccagggtatgaacgccaagacaaggatcactaaggccatcttagcagctgcccaccatggtgacagaaaccagaacagcagggaattgactggaaggggaacaagtaaaccttctgggatgatgaaaatgctctccatctggatttagattgttggttatgcaggtatatatgtttgtcaagactcctcagtttatacacttaagatctgtacatttcactgcatgtaattttaaaatatttttaaaaggataatttgtcattttagatatcatgagaatgaatgcagacccttctacagcagaccaaacagaggtaaccacaaaacaacacactcatttatcatgctacactgcaagtatataaacctaataaagtcaaaggaacacaaatgttgtatttttacaaggctctatttactctcctctgggaagggtgttcaggatttttagccaaacctctaagacttggttggggatctgaggacaaccaaccacagtttcttcttttaaagtatctgtctagttcccaaaaagggaagagacaggcagccttctttaagacttagatccctccagaaagatgagaaatggagctaagatcagggttggggctgaggacaattgaccataatcaattccctgtctcaaaatgccgtacttctaagagggctcacatggatttttggacaacaaacacctcatagaaaagagtattttgacaaataaagtataactgaatcagaaacaggcggctcacatttctcttaaaacataccaggattttaaaattaagaaaaatcttgcttgaccaagtacctctgaagtttttcagatctgaaacatttagaaaagcagttttacctactttcataacccaaagtgcatgcagattgtcatcttttggaagtggatccactggaggtgaaccattttgctgtttatccctttaccatttggacagtgacagtggctagttctcttctgatggccaaattattttcctttcagttgctgacagctattcatgtgctgagctccatgctaggcacaggggaagccggctggcagctctcccactgcatcggacaggcttagccaaaggagagggtttgaaccctcctcccaaagatctgattggctgaacatgcagtgagttcccatggtagccttgagatattttctttggtgttggggttttagcaggagaggcttcaagcactggcctccagtaaccaatgccccttggaatttgcagtgccaagttcaaatatttccaggattactgaacccatgaggccaaaaatcagagaggaaatgtgcaaaggctatatgtgtatatttactaactcttcatctggtctccatcttcttcctctgaagtagtgggggaggctgcccaaccatgatgcaaactcaaagtgaagcgtggttttggaaaatcacatccaataacaatgtaacacaacctcgggactgtttaaaatccagagagttctaagtgaaggagagcgacctctatcaatctctgtagtgtagaatgaactgcaagaatcacagataggtctgcctgtgcacacgcacagcccagtctctggcatccgctgaggactcagccagtccagccattatagcagacatggggcaatctggaggcagtctggccccaaccagtctcttctcaccaacacctcttcccataaacatccacacacacatggaaaaatgtgaggaatccattttcatttgattcgagaatgccaatcttcaagggcccagctggggtacagcagtgtagcaggaaaatgtatgagctttgggccattcttcactgaatttccttaagcaagtgatttacattctctgagccttagatagtggtacctgcaaggagtgaaaggcaatagaaaataaatatcaagattggaaatgggccagcatcagggccaccttattgcacacttttaaggtgctatcttaacatcatacttcatgtaaatagtgcccctggagtcatacaacttggtgcttcttactgccactcacaggttcagggaccaagactggcagttcccaaggggaaagatccctgaatccttctacaagactttgttctgagatgtagaccacaggaagcctggccgaatctggaaagccaccatacaataacaagataatttgcaaagaaaatatttaaagtaacaaccacaaaaataaaacccaaagcaagatgggctcaaaagccaaaagttaaaacaaacaaaaaagtataatactatgaatattaacaaatccagtaaatggaagaattcatttccagaaaaaatgataataataaagtaatctgaaaaggactttaaaataggtcaccttaaaattcctaaagagacaaaggaagtaatatattcataaaataagaataggaagttgtgaatcaaatattagagattatgaacgacaacaggagcatacaaaaaaccagaaatctggaagtgaaaactatactcatttgaaaataaaaacaaatgatgacagaagagataaacaggagactgaacagagtcaagaagtgatgatttacaaaatgaaatctcttataacctagttagtaaagagagcaaaaacaaaaaaagacattatctttttcctactcccaaatcccctgtctccctccactagcctcatatatcctacaactctttcccctcagaaatgaatcactgaacacgaggtttaggttgcaggaggaacgttttggcagaactgctcttggcggctgtcatcttcctacctgctggagtttctgcagtcggcctctcgacgagccagtctctagacagcttggccatttattctaggcatcctcaccaaaggtttatccagtccctgctggaacattccagtgacgggaccgtctacatttagtgcctctacctagtaggggaaagaatttccccaaaatagaggcacactcaatctacaacccaattctacttaatttgtattagaaaatctcatgttactgaaggtagggaaaaattgaattcagttcattgtgatcccccctttcatccccagggatgtgagtatgttctagaggggacttaggtagagaaagcacctggctcttgagtcctctgtccactcagttgtctaccaagatgagcaaagtgtcatctgatccttgaccttgggtcccaggctctctacttgagcctcctcgtccccgcagctgtggttcctgcagatcccgagctggcaccagcccacctatgccattcctaggcgggtggtggggtggtcacaggagcctgcctgtgtctttgaggggtgtgctggggcactggaagcctggtgagactctcaatggggaggccgtcaaacagtcagtgactccccagggcctccctgcctcctggaggctccaccatagcctgctcgagaagtggggcatctcctctttcctcatgtaatctcatctctcttccacacttgacccctccaacacccacctcaccaccccaagttttttccagcctctggaagaagttcctcccttcctaatggtgatgatccttctctcagaggtacaggatattgtttcataacaaactcatgtttttggaaacacaaaaatcagggaaggccattccccatcactctccaaaatggaagctgagaaggaaaggggaaatgctagagaaagtagacagtaatggtgtaaaatgcaaacatttactccactaccctcatatcaaactgaatgcccctctctgtagctccctgccggggtgttacctcctggctgggactcagggcccatggcctccagagtcttctcttctctgaggggagcatccccagctccttcaaccatgtgacagctctgtggttctccaccaggttggaaaatctttctgagaaagttgaatgaccttggaaaatttccttcacctttctttgccctgatagctttctctgtacaatggggctaagaataggccaggcctcctgggctgcagcagctctgtgattggtattgtgtgaggctgggaggctaaggtcggcttctctccccagctctgcccctgccacatccccataagtgacatgtattaacttactcaatctctgcaaaaagccttaagggttaggctattatgatgctctccatttcacagaagggaatgggcataagaataagttaggtaacttgctgaaggaagtgaagcagtgacattcaaatgcagcagtcggctcccaagccaaacactgttccattcactttctcaaagcgtggtgccatggcctcaaaccctttaattgttctctatgtttcatcagcctttttcatttctaagcttgtcggcttctatattctctcttttttttctgttaaaaatattttccatagcttatcgatttggtgaatttattttttaaggaattaacccacatcatgtagcctattgtttctcttttcagtttatttctctatgctgtttgtatttctttcctccgctcatgttctctgagccagcatctttctttgttaactttttagatcattaaagctcacttagcatttttaataaaattgccatttaaagaaattactttccctctgagaacggtttggcctgagtccacagagtatctgtgttttaattgttttcttaaatgtttgtaactttcttcgaatttcctccctgcctggttggtacttaggagactacttttagattttgtgtggttaggtaccttttttttttttttttttgagacggagtctcactctgtcgcccaggctggagcgcaatagtgcaatctcagcacaccgcaaccttcacctcctgggttcaagctattctcctgcctcagcctcccgagcagctgggattacaggtgtgtgccaccacccctggctaattttgtatttttagtagggatggggtttctccatgttggtcaggctggtctcgaactcctgatctcaggtgatccacccacctctgcctcccaaagtgctgggattacaggcgtgagccaccgcacccagccatggttaggcacttttatatcttgcttcttctgcttatttctaatttattgtctgaggcacagaatgtagtgcatataacgaagggactttttgatgtttctattcttttctttctttcattttttttcttttgcatgctctgagaactccttggctgcccagaaggttccactgagcacacttaattccttgcagagtcttgcttagacattgatggcctaaaccatggtggttggcgaagatcctattccctgtgggtttctcccaattgcattgaggtccctgatgaagtaggtagaacaaacccaggcatgaagggctggtagcagttggggagccagggccggacacagggaggccatcataaaaaacagccagggaatccaccactggggaggatgaggccatatgtagtggccgtagacatggcaacctggatccctctgaggtctgtggggaagaagcacgtgggtcaactgtgatataggcaataagtatgtagattctaggtgagtcaaatgtcaaaaactgatggggacccagcttacatgagcttcacatcaagcaggtgggcatgctttgaattagtggagatgaacaaggacacagagaatttggcctttagccaatcgcatattttcttatttatttaatgagataaattgtatttatgtatctatttattccactattatctgtagaaggtctactgtgcacctttctggtccctgctaaaacactgccttcattccactgagaagtagaccacataggtctcaggaccttctgtggtttcactcactcctccaaaaatgaaatatcctttctattttttgatttccaatttctaagtttaggggtgcttcggtggcatagtagaaaaaaggtggggccccactttattctgtgtgttaccctgtgcaaatcatcagacttcctggatcctgtttttccatctgtgaacaaggagtgaggggctgccttttaggcactaaactggagaagcctaaagagcgagcagactgtgaagcacccacaaccacgggtgacagcggtggtgggaggaggtgaggtggcggttaaagcagtgaagcccctcgtcagacttaaccatgccgcagcaggtagcacagagtctgaaatccatgcagcttcccccatgtatgcctttcctgcaaggatttcacatacaagtaagaagtgtggtccttctcctgttggctctgatatcctttccaagtagtcaagcctttaagtaacagccacactcaagcaagaagaaacactggatgagggaatgcctagcctccctcagcctgccttttcttctcctcattcacacaccagtctagatttgagactggggcatttaaacagccccgacccctcacatgggctgagtttaggttacatctgctgctggttcatttctagtaactggatttctgccttgttcctaagggttgattctcaacccagctctgctcccctggagctagagctgtttatgctcaagagagtaatccccactcataccccaagactggaggcctaaccctaaaactgccttggagtctgtggccagcctggcactggcaagttttctgaaagtctgaatatctccatacctgccatcctgtgtgtaaccaccatgccccagcaagaccctctcacggtttgggtgcaggactgccccctatggtctgtcttgtgctacccatgccaaaggactttttccacctggatacgttgtttatttcgcctgttagcccagattccttccccgactccaattccttccttgtctttccatcaatgtttggcaggttgaattacagatctaggacatttctaccttagcccattcctccatgtccaaccaataaaggaattttctccacctgtttcaaggggagcctggaagtagccattagacaaatccttgagaattccaaacacgatagctcaaacagcaattgccatagctgatttacaaatgaagaaatggtttacagcagtctaaaggctaaactaggaaattctgtggccacactaggaaggaagaggcaaagaaggagtgggcttacttacatgagttttttttttttttttaataagaaaatgaaagtaaaagggcattgggcattccttcattctttcttttgacaaccatgtaactgaccaccaaccatattccaggttctatggtggattcaacagggaacaatatgaacaaggtcccgaagagccttttggagtcatagatcagttggtttcatccacaaaggaagactggaaagaagaggtgattcatatgtgagaataaaaccaaagccaaacctgaagccaatcattcagagagcccaaggcacaaaccaacaactctgaatcaactcactgagtccctactgtgtttatggtattcacctccacccctaggacaccaggtcctttcctagaaaagcttctcccattcatctgattgcttccaactaggctgagaatcatctcagcaatacacaagacatctgcacctccagaagctgcagacaaagtcaaaggtactgcccagtcctgccctgtcttctgatccaattctgaacccacctagaaacacaaagctagggggattttccaggtttctgatttcactgcaaaagtgcctgtgtgcctcagttgaattgtgtaggtaatttgactttaagatggctttttgaaagaataaatcagtgacacccaataatttctttaaaggaacatggaatctaaaagaaccaaaatatagtattagccaaagaaggcactcctcagccaagccttccatttggggttctaactctttgtcagaccttgggacatcagagattgctcattctaacttcagtacagcctcctgccctgagaaaggaaccatcagaacattcaatcacttttatagaacaactgcagtgacttaaggtgtaaatggattggaaacaaaaggcttgcattttccttgatacacaaaaggggttaaaaattaagaggaagcctgtagggaagggtttttgctgaatctaatgcatttttcaaaacactctaaaaagagctatgggcccagagccagctgagctcaatctcctgaattttattttaagcagatcaagcttgtaggttatactatttatactatttgccatgttttccatttagacaaaaatcccctagaatctacaggaaaggaaaaggaagcagcattttatggctcacgcttgcaatggctaactggtttatagaaagactgtgaaggcatttggcttcaaacgacaactcttgggagtccagggtcagcaaggttcctggagggtgatgggctgctctgggcactggcatgaagagaagccacagtcagccaactctgacttctcttaggctggacatgaggacagagccagaaagccccctggagcagactatgtcccatctccttgaggcctgcaagaacctggcttagtctgttttgtgctgctataacagaatacacagagtgggtaatttataaagagcagagttatttcttacaggtctgcagactgggaagtccaagatcaaggggcccacatttggaaaaggacttcttgctgtatcattccatggtgaaaggcagaagggcaagaggagccaaactcgcttttgtaacaacccactcccacaataaggacacgaatccattcaggagagcagagcccccatgacctaatcacttcttcagggttccacttgcaacactattgtattggggattaagtttccaacccacgaactctatggtttgaatgagaaaacaagaaaaccaaggcctggggagggaaggaactctccactatcagagtctgttagtcctggagctggacttaaatttgcttgtgtccagagggaagcacctaccccaagagcatcacttggaggactttgtgtgggagctgaggctggtcctgggggtgccaggagaagaatcagaaggactgggcttgattcccaaccccaccaacaataaaggctcaggcactttattaacatctttgggcggtttcctcatcagttgaaaaaggaagatagcatatgcagagtttgtgtgatgataaaggagacataggagacaaagcaggtttgcccagacagtgcccagcacagagtggtggtctgctgctgtgagtgccatcaacccacttggggccctgtggccttggtccctccaagggaagctccatgctcaggctttcccacctggtcttaaacaacaactaaatcactttgatttcatgttgaaggcagcaagaaaaagaaaatctctgcctagcttctggcttccttgtgacattagccttcgaattaagtatatacaaaaatcacacagtttaaccacaagaaaacctccataaaccagtccacatatcctgaacaaaagtgctttcaaatgacagaggcatggttaaaaagtttactgagaataactacacttcataaaaagcaaaatccgtgactcaaccccactcacagagtggggatggggacagaggtggacatcagcggccatagattgatcaaatctcccattattccaagcaggcagaacccagggaactcaggttgggacaaagagcccattagagggcaggagcttggaagagaggtcagcacagagatggggagcagagaggcttggcctgggacactcacaggggagcccacagatcctgctggatgccggtcacaggaagcatcagggaacatgacatatgacaccgggctttacagatgttctgctgaggagctggagaattgtggctacaggagaaagacacatttgggacccagaaaattctttttatgatgccaatttcaagagtaaggggagtctataaaacatgcggggggctctggtttctgactccgctgtgcatacaagtgtgaaatagaacagtgttttgtgctaggtggagaaaactgcatgttcagtccatatatcttggctcataagtcatttctgtaggatcgcccagccagctgcatctccagccaacaaggccttgcactctcatttctaaagcttgtttaaatgaaatccatagattcccaagtagtgtctcttgttcctgccttagacaggtgtagtctgcatccattctgttaagcaacttggctgtacttacgtcatctcaaggacctgtgaggtgttatcactgccccatttctcaaatagggaaatcatgtccacaggaggagggacttccttgaggttcacagctagtcaaggatggagagcaggcctgttaactcagctgtgcccacctctgaaggtggctctgctctccttctgccgatgttccaaatgggacaggtgtggtgacacggggaccacagaaggccaggtctgtctcctgagatggctggtgggttagtcccagccatgctgagtggctctggcttcaggggcagagtcattatgccccagctttagtaaagggatgcatcaacccgtccccatctgataatttgataatacacaggaaaccaatgtaaagtcagaaagttgccaaaacagccaatgcttctgcatcctgggtctgaatttacatctgccccaggaacctcccaggtggtgacgcatggccagcaccatctgtttcccagcattctcggctccaggtgtggcccatgggccagcagcctgagcagcggctgaagcttgttagactgcagacccccagtcctgtgcagagctgctgaataaaacccccaggggatttgtgagcactgtgaagggtgagaagcactgcccaggtggcacaaagaagtagaatgccagctttgtcccctgagatacttcctgtctgggcctccctggttgggcttctccattgcagctggctacatggattcaagttctaggaaggccagtgagactgcagagaagttactcaactgcgcaggacacatttcctaacctgtaaatgagaacagcagcagagcctatgcatgcggattcttgggaggaatgaatcaggacagggcgtgatgtagccagcacagtgtggatgctcgctgcccttctgactgggacatgtgctttgctgacacatgcagcttggttaaagtcacagcttactgacttgaaagtctttaaaataattttataatctctgctatgaactcaataggagttcattataaacatttcatccatttatatttcccccattgccaatcccttgtggtaactgttatgaactgaccaggttttacacgaactcatgtgccttctggtgcctgcatgtgttcatgaagctactcattcaggtgcagatgcttacagaggactctacggtgtgtgagttcctggaactcagaatcaatgaagaaactccctttactctcatgatccaatcaatgatagagagtgatgtggtgtaggattaaagaagctctggtctcccagggtataaagaagctcctagcccaacccagttgggagagagctccccagagggggctatgctgagctgtggtcttccggagctgaagggtgtgtttaacccctggggacagaagcagggaactcctgggggccatgtccttcctccacccctatttcttgttaagagaaacccagtctcatacattaagccgagaatggggatacattcatttgttggagaatttaaagaacaagatgttgtatttggacagaaagaaatggctgttttttgagtaaggaaatctgacacaggccaccacatggatgaaccttgaggacatcatgcttagtgaaataagctagtcagaaaaggtcaattctgcatgattccacttatatgagggtcctaggggagttaaaattatagagacaggaaggctaatggtggttgccagggcctggggagaggcaggaatgcgaactgactgtttaatgggttcagagcttcagttttgcaagatgaagagttctggagatggacagtagtgaaggttgcacagcaacaagaatgtacttaatgccactgaattgttcacttaaaatggttgagaaagtcaattttatgttatgtatattttataatttaaaaactgggaaaaagaaatgactgcctatgatatattaaagtgaaaaaagagagagaagggggagtaaaagatgcatgctcttattctgatcactcaattaagtgaaatagtataaatcctcaatttaaggtaaaaattactccttggctttgtaaagagtgtcagactctgagacagagagaactagcttcctgtcttgctcttacagttactggctcaatggactttatctttagaacattcagtctcttcatctataaaatgcagcaaaataatacacaggtttttgaaacctttggttagatctcattaaacactctgtgcagcctggttcatcctgcaaactgcagagaaagaggtttataaacctagatgacagagcaggccgtgggcattgcagaggagttatctggaactctcagtgaatcccacaactcataaataatattatgacaaaaactctttcagtcattccaaaaatgtgctgctatcagaggtgttattataatttttttttaacttggatgtccaagaggggacgggcagttcttaatgttatcctttaatgccttagactggccaggatggtgggacacccttgctcagtgttggaggctaccatgtgacagtacaggctaaggctggcctgtccccatatggacttgtgtctgctattaaatgctgtcctcaactttaacctttttcctagatgagctttgtatgagttttctattgctgcataagaaaattactccaaggcattagtggcttaaaacaatacttattttgcttatgaatctgaaagtcagacaatgtggcttatctgtgccttatgtggcatacgttgggttggagggtctacttccaggctggctcgttcacttggctggcaagtggccactggctgtggaccaggagttcagctggggctgggcacttgggatcagttcttccacacgtaggcccctccacaggctgctggggctttctcacagtgtggtggtagggctccaaaagtaactgtccccagagaacctagcagaaatgcatgacaatattatgacccagcctagccttggatgtcacatggtgtcacttcctccatattctattactcaaagcagtcacccaggcctggttccaggggagaggtcataggtgccacttctagatgagggaagtggtaagattgtggaaaggcacgtgggacagaagatactgttagggccatctttgaaaaatacaatctgccacaagttctgtcctcagctgggaagagtgccacccctgtctgcaagttcctcaagtttccctaacttaactttgctaggaggaagggcctgtttggccaaatacctaatgccttcctccccttctcagagggatgtgaataactttcctgctttcccccaaatcttatttctgctgagaatcaggagtacagcttcctgttagtgtcacttcaccaccatctccattaaacatccttctcacttggtaatcagttttccagctgcagcacctctgagatcactccagaaatcatgccctctgctcccagtgtggggacctgtgctaatctgaggcgggtcctgaagcagcgcctcttggacctgcttctcagacactccatcagaagcaagacacagtgcctcccactccggcagctcacccaaatgaagggcccctctcccttcatctagcactgcctggcccctgtcagacctcagccatcaccactccccatggagccagagctgatagaagtatcagtccataagccattcagacatgcagacagacacaggcctgggaaactggacttctcaagtcagtgacgaaagctctggtgaacacagctgaggaggtgctgtcatgattctctcccatcccccaggagaggaaactgaggcctagggagggttaatgatgtgttcatggttacagctggaacatttcaactaaaaatttttgaagttgtgtccagaatgtttcctataacattctgactttccagaaaaaaatgtaattgctatatttctcatagtatttatcttatgcatcaaagtgtgatgtaagagtaataaaaaaggaatgaactattgatatatacagcaacatgaatgaatcttaataaaaagagtgtacactcatccatccatagaaaactccagaaaatgcaaactagtgaatagtaacaaaacagatcaatgtttgcctgaggatgggggcataagggtgggagaaaaggattatatacgggtgcaaggaaactaggaaatgatggatgtctttgttatcttgatgtggtggtgatttcatatgtgtcacaatgttaaaaattgtgcattttaaatgagcagtttattgtatgtctactatacctcaaaaaagctattaaacatgaataaaaattattatgtgaaacagagctaaagttattttacagccatgaagaaatcaggattcctttctataaatatgtttgaataattttaatctggtgaagatttgtactaatttcttagagaaaggaaaaacacaaataaatgatgaaaatgtaaataaatagtttttgctaaaaggagaaattcatatgccaggagcttggctgtctcttaatcaaaaaaaaaaaagacatatgtcattgtgattttgccctaaattaaattgaaaatgtcattttgtttcatcatcaagactatcatccaagggagatgtttttgctattgtgattttgcagattgaaaaaccgagtctcagaaagttctaggacatctccgtggcaaagatgggattggaccaaggtctctgtgcctggttctaaaactcactctttcatccatagcacaccaactcttttcaaataaagagaaagagggaaggaacagaatggatggagatatgggggcccttttcttccaggtgccccaggaagggaattttggagtccactgaaataccatcctgggaaatggagacgcagaggggttgcaccatccttgtcttccacagtgactctcctacaaacacctctcctctccttcccctctttggctccagaaggagccctcctcagttggcctgaatgcagccttctggtgggagtgatgaaaggctgtgacatgctctctcctccttcctccttattttgatggcaagaatagagaggaacattagagctaaaggatgtcttcttactgcaaggcccctttgattctggaggagccaaaatgtaccccaaagacaagaaactgaccatcccaaaggtgtttggtctggagaggcaggaatttcagcagggagattttaggtagacattagcaatgcagggccagtggatggaagccaggcagcaacttagggctgatctctatagggatgaggaggccacaggtgtccacagtgacatgagtgtgagctgcacgctgccattaagtcttccccagggcagagagagtctcaggcatctctgcacagtgactttgcctgttctttagagtctttgtctgttcttaagagtctttgtttcaggttcgatggccgagaggtggaagtctttctagaccctcctgccaaccggaaagggttcagaagtggggctgggtacaggaggagcagaaccttcagagacagcacccaaggaaccaggttggcctctaaagagcacccccaaacgctcttcctcacagctttacacgcctgagctgtgacattctgctgaaaagaaagggatgtggtgtgattaaaatatatttgtgaaaggttggattaaacaatattaagcaagcttccttacatcatatacacccatgagagggatgtgatgcacagcactggagtggctactgtaatgctcccaccaccaccacctttatcaccatcaggaccaaaagctccaagctactgagggagctactggcagtcagccccctgtgctggccatcacagaatggtttcagctaaaagactaccttgagagtcaccttggccctcactcaacctcttccgggaaactcatgtccagtgattggccaatgcagggtatgaagtcctgtctcctcacctcgcctgccaatgctgtggggctatccagctttagagctctctggggaatcagcaaggccgctgttgcaactgcatgaagccacatttctccctctgcttctgttcctttcacagttgctgatctgagagcatccccaggagatctcctgtcttgaatcttggtatcagattttccttccagggagcccagcctgcagccatcctgatacccaatttggagagtgttctaatatttgactgtgaggtgatttgggctgatgtttctagataaatattgctaattacatgagaaagttacttcccatcccatgttcttgtagtaggagctaaaactgaattttagcaaaaaccttttggcagctagcaagatggtcatgggcctccctttcctgcaacctgctgctgtgagagtatgaaagggatatggcatagccttcctttcctttgcccagagagttgttctttgcaatagaagaaacaatgtccttagttcaagtggatggtggggagttgtctcagcagaagatggagaaggtccccattggcagcaactgccagttgctcccacttcccattccctgggcctgagttcagcctccagcagaatccccgcccgggcttctgaccattgagaggagatgtggcccaccaacacgctggagcgaggcactgttttgagaggcagctttcaggttctacagaatgtcaaaacttaccctcacaaaatgactgggacccaaggcagctgcctgaccagcctggcctctgaatccctgctcttcactgtatgggccgcagggaacccctgagagcctgccctgtgaccatggaaatgtatcttcagcccatccacatactgtgcagagtgtcgtgctttataaagcatttcaccttttcacctaaaattaatacaccttttatttaagttgatagaaaggatttagttggctttttccaaaaccgcaaagaggaggagtgaagtcctctgggggatagagccagggcctacagactgggagaagttggggaacattcttactgccccgcctttgtagcaaaaaagcccagactcagggaagtgatctcattggctggaagtcaaactgatggacttgaaatttgaactcaggacgtctaaatctataacactataaatctgtaacacccctaaagttgacaattgtgcattaggcatccagaactgtctaagtctgttctagctgctataaccaaattccttatatagtattagttgatttttaaacaacatagattttttcacagttccagaggctgggaactccaagatccaggcactggcatatttggtgtccggtgagggcctgtttgttatagatagcgccttctatgtgtcctcacatggtggaaagggaggccaactccctcaagcctatttcataagggcactaacctcattcacgaggactctaccctcataaccgaatcacaaccgaatcagttggagcccaaaggctccaactaataccaacacactggggattagatttcaacatctgcattttggagggacataaaaattcagatcacaacaaatacatatatatcaaaaatatacatatattttggaagtttattttttcctgtgaattcttcctttttattatgatatacaaatttgttaacatagagttatagttttctcttttacttctaaaaataatctcattcctaattgtctgtgtttgtacaattcttccctgtgcctgttgacttccttgcttagacttaccagttatgctccctttgctgctgtttttcaaagaactgggatggggcagtatttgacttctccttgtgcccaggacctagactggtgcccagcacaaaatgttctggtaaagctactggagtaaaggaatgaatgggtggggcaccttggagggaaatggaggtttctggctctctttgttaccacattgcctaggaaagtgtttctctcagctcccagcatcacggctggagaaacatcttacatgttcagcaactggctctgcccttctctcagatggaaggtctgactcagccagggtctgggtcttggtctttagtggtaaaatgttctctcttacaacctagagtcttgggggtgatggtcccaaatactgtgggcagggagggaaaggacttctgtgctggggcaaggatgctggactctagcctgctaccttgctgttaccaaatgtgctcctttgtcattttgggcccatctgaagggctcccgagcttgagcctcatgcagcacccaaccaggatttagataagacgaagacgatgtgtggagggaagcccaggggtgggcctgcaggagatcctaggcacttcaggacaatgggcatctcctgagagagaacgtgctcatgagaagagggtccacacatacacttgcgaaaggctttcagagccatggtggcctgaaaacagggccttggatcacctcactggtgccaggaaggaggaaaggggaggacacaacagtctactttccacagcaaaaagcatccacagagcccctcgcagtggttcatgcgtccatcttctttactactcctggctgcagtgaaggtcagaaaatgtagtctctcagctgggcacatcactgtcccagataaaaataggggtgctgttaggaagcaagaggcaggcactgacagagcagcctctgccgcctccactttttcagctgcccgacgttcacacaggctgttcctacccaccggacacacgcctcacatcctccagggacaccatccccaagtgccatcagctgccacagccaacccaaaggcctgatctgcatgatgggcggctccctccctcaggtatcacgtggccatcttctccagctcacctggtggccttgtgagccatacacctaaggacaagtcatctcacccagcaccctccatataaaggacagggaagggacaggacaaccccaacaaaaactctcaggaaaacttctgaaccactgctgtccatagcgatgatcaaatcctgcttatcggaaattcgaatcccttctctggcaccggagtcaattccaggttaaatggcaaggtggggtccccctcgtccatggtctttgtgatccctggcacctctccatgggctcttctgaaatggggagtccccttcttcttttaggaacctgcacacctcctgttggtgtagttcaggggcctgaaaacgactttaggggatgaggatccaaagtccccatgttcctgtttagcagacggtgctctagtgttgcaggttgggtctgagccccctctccctgcctctgaccacgcggcctctttctcagctcccgtgagcttctgggcactgctaaggctggtactgccatgcaatgtgggatcagattgaaccatgtgaaagtaccgtttagcaggacaaaaatggtcaaatggcaataagttccaataattcaacctagtacaaatgttaacctattgctgagggggcttcatttgaaactggatttgacacaaggagaaaatacaagtcaaatatttaaacagtggccgacacattgcaagcaatcaatgaatagttattgattctattatcagtagaattatattaatcaatagagtgattgatagactctattattgatattgtcattgaacacacaacattaatcaatgttattgtggaaagtttaactggaattggtgaaaggtattttggactccacattgtcctggttattatttcctctccgccatgtccagggttaaacagtgccacatttaaccacagtctatagccacactcaatagccagtctatcgagactgcacaaattgaactctgttatctcagactttgtcacattttttcctagttcattctggctgaacgttagactcctttgggggtaatttttaaatgttgaatcagagtcttggaggtaaggcttggatgttagtgtgattctaatacagggcaagaattaagaaccacagacctagctgatatgtataatctattattcttttgtctggtccatcaatgctggtggagggcagagatgcattcgccagagcatccaggagcactcagcaggagaggtggggatggttgctagctaacgtgggggtgacttctccctggttttgcaagaagctacccctgggagagaactatgggctaatgcaaaaggtgacagcaaggctattcggcactcattatatgagtgtgtctcaattatttatccattctattgttgatgacattgggattatttccagtttggaacaattgcatggaactactatccatgtctatttttgtagatataagcaaaatcttttattactacagattcacacatatattttttcattgttacacttcttgatacataaattatctgaaatatggtcaatgggactgccttaaggctggcttctgtattcttttgacgtatttccagtattattcaagcactttcttactttctgacataacaaagtgctccagacttattttctttctccaggcctataattatcgatttctccaagaatatctgactcatttcagtgaaaaatggtatttggaaaccaagatttgggttactagatagactcattgctgctgttatttgtctttttggtaggcagaacttggaggtgtggatggatgagtgaaagggatatacctaaaatcatgaatttatagtgatatttctaattcaaatttaataaaatagggtttttccttttagtttttacttgtaccttcttttccttataatgaaagtcttagttctcaatattagtgtatttacccatttgttttctcttataatatccacaatgtttcttgctccataaaataaatataatcagtatcttgtgattcctcactatgtaattcggtgcccctgaacttctttgtgcctctcctaaacacagcatgccttttagattttgaaaagttttatcacttatgccttgctctgcaaatacatctttcgtgattgatttgtatgttgattctgaaaatcaaacacaaatgactagcatttttgttagtgtgatgatgtgttaagttgaatcatatgaaaattatggcaatttcctatggtataattagtcatttttattagagaaacgtgcttaaaaataagcttattttcctaggtcggtgaatgtttgctgttctatagatagtattccaaagtttaaagtcaaacctattcccttcttaaatgctattgattacacaagattataccaagattagcttgttgtgtgtttgtaccataacttttacagttttttgttttgtctggagaatctgattaccttttcatttttctttatagcagagagatcacttgccttctaaaccatatttataagacatttgagcttttaatcatacttgttgagtgcattgatgttttagccaggcacagtagtttctgcctgtaatcccagcaccagcacttcgggaggccaaggtggtaagatcagttgaggtccagagttttgagaccagcctggccaacacagtgacacctcgtctctactaacaatacaaaaattagcccagcatcgtggcgcacaccacacttgtaatcccagctacgcaggaggctgacgtcagcaaatagcttgaacgggagaagcgaaaatcacagtgagccaatattgcaccagtgcactccagcctgggtggcagagtaagatcttgtctcaaaagaaaaaaaaaaaaccggggaccttcgcagtgagtgttacagctcctaagccaagtgttacagctcttaaaggtggcatggacccaaacggtaagcagcagcaaaatatatcgtgaggaactaaacaacaaagctcccacagcgtaagaaacaatcctagcagcttaccgctgctggctggtgtgggagtggggcgggtacagcttttattcccttatttgtccccacccacgtcctagtgattggtccattttacagattgctgattggtccactttacagattgatgattggtgcactttacagagtgctgattggtccattttacagagtgctgattggtccattttacagagtgctgatcagtccacttacaattctctagctagacacagagtgctgattggtgcattgacaatcctttagctagacacagagcgctcattggtgcatttacaatcctctagctagatagaaaagttctccaagtccccagtagaccaaggaagtgcagctggcctcacctttcaacagcatgaaagggaagagaggagagagggccaggacaagggagttaaaggtcgccagctgccggttatccttcccaagccttcccggctgacctgaggggacctctccacatccaacagcccagtaccacctccggtagcctgaaatggaagccccgcttctgcctaatggaagacagaagctgcttccatttcagcttgcttccaaattcaaagcttggctccacaaaatcctgttttgcattagaaactcatcttttctctcctgggagcctggccaggcctgtgtcccagaaagggaaatggagacactgggagtgagacccgaggttgatggagggtaggcggctgcctcctgagagtagggcgaagggcagagggcaagcaggaggaggagcccgcctgactcctacatcctcgggatcttgcctggtccggagctgacgggttgaggaccctctgagcacccttcctctcaccaggcaggcgtggcatggcagacctcattacggacggccatcctcgccttggcccctcacctgggaacagaaggcttcgcctggctttgagtgttctttctacaacaaactgcatccacttagccttctttcgtggggactttcgggaaaagagatgacttgaaaataacataatcataacacggatagacttggaaattaaatttgctgggcggttgagtttgagagaaacaactcatgaggggacagactttcaagtgtgagttattttgaccaccacctctcacatccactcatgcatgtccacagtgtgcatcccacacgctcctcgaacaaacgggcatcaaccctggcgacgggagccccctggaaggatggggtgctgtacaggtgcccagccatggtcttgggtagtcctcacactgtggttcaaatcctgtgattctacagctgggtttcctgccctcactacggtcctttccacaaattctctctctcctgcctgctatttctgtcccccgctcatagcagaggccacaaacctcctccatgctgggtccttcctttcttcctctgctgaaatccaccccacggccaaggagaccacgtttatcaagtgcccaccgtgtctcaggcagttctgacacatggtttcacattattttaatctctatgacaattataagaggcaaatatcatgccctgccttctagatgaggagagaggctcagagaaatacctagtggtacaagaacccgacagatgaacgtggcgcaagggtgggggaaaccaacaagacctcgatctctctctttctctcatgaagagctgcactcctccctctccacggccccaacactgcaccggtgggctttctgcttgtggtttttaacaggctggccttttgtcctggcaggaaccattatttatgtcccttagcgaaattcatatagataggtcgcagaagtgaacttcctgcctgaacagcatcagagcccagccactcaggatggaggtagttcctttctgcaaagccttctagacctttaacctgcctccccgagacccatgacaacccagaggcattgctttcttccagggcctccctggcaggtcaaggtgacatgtgacacacccatggacgctcctgggtctcagccatttccacagtgctaatggaaatgccacaactttctcacatatgggggaaaaaatgtccaacggagactcttataagggtgacaattttaggaaaatcctcagctccctcaacaaaccagttagaagcgttcagaaagcagtgctgttgccccaggtgaaggcaggcaactggtgttgacctcctcaaatccccaccaggcaaagaattctccataaagacattgaggtgttattgggaggagaagtgcatgctaggcaggaataaatacataaatatgtactacagagacagaccagggtctcagctgtgagcagtgtgtagcgtagactgatgtggttatggatgtggatggatatgggacaactcttgtgtgttttcaatccactcagatcttgtagagctggtgttgttacccttatccaacaggaaaaacacctcagggctcagcaaggtgaagacatccacacagctacactctaccatttattaacccaacagatttaaaaactactgagtgaatagaaaatgcatgttatagggagaacttgaaaatgtattttatttaaaacatttatttttatttttactttttgagacagagccttgctgtgttgcccaggctggagcacagtggcatgatcacagctcacttctgtttcaacctcctgggctcaagtgatcttcccacctcagccccccaagattgctggaaccacaggcaccactatggccaccactatggcatgcgccataatgcccaacacattttaaaaaaattttgtagagataggttctcactttgttgccaggctggtctcaccagccactccacacctggctgccgtggccctcctattcatcggattccttcacctccctgctgtcctgccccctctgtgatttcagtgacagttcttttctttcctctgcacagccggctcctgaagttcaatagaacttcaaggagggaactgttgtattcagccactcgagaggagcggcagcctttgagagcatccagggacctgctgggcctttcttcacaaactcttgtgggcaaggtgcttggcaaagccacagcctgagctgggaacaggagccaggcaccctgccaaccgcccggcccagtgtcagaaccatgtccaagtaagctttccaagaaacaagttgtggccctggaggcttctctgttcagcccccttcagagaggaggctggagtgagggaggacccccaagtgtgtctgggtctaggcatctctgtggttgggacacagctggcatggtccagggcccaggcagcaggacacagaaatgagccgtgactgattcctgcccatctcgacagggcaaggagtgaggagctttgggattgcacagaggctgagggttgcaggcttcatggcatggccaggggcctcccatatgcagcacaggtggccccggcaagaggccagagtcacccagcttacctggcaggtacacttaagggcatcagagggccactgagggaggctgtcaggggtgtaggcaggtgtgcctgccttcttcgaagtccttgctcttctgatccccgaaactgggtctgccccttcctcccagaggctcatgcctttgccagggatgtgaatgcgcatgagtgctctgcttggagcaggcctggcagagcctctcagtcccccagtgcaatgctctggggtgataacctcaatcaatgaccccaatcaatgaacccagtcaataactaattcagtgaccccattgaatggccccaatcggtcaggcctgcccaggaaacacagccgaaccgagtgccttccctggtttagattctcaaccccccacctcatccaattttatgccaccttcacccccacctcagggatgccaagcctggtgggaagaccacacatgaaaccttattagtcatttacatttcggtgtgaattagattaccagctcctgttcttagaacatttattcatttgataagcacttactcatccatcttctacatcaggttccgtgctggggcagcagcagacagagttgaataaagatgaacaagccatgtccctggttccacagaggctctagaaagagagaagtcatgagcggctgcagctccaggtgcaagtcatggtagagacaccaatgcgtgcatggggctcaggaaaaccaaaggaacatcaccagggaggtgacatgggattaggcctgggaggatggatagcttctgtaggcagaagtagcagacaccaggaatatggcaagcataagacccaatgcagggagtaggaaagtgctggactctgagaaacagctggatgcccaactagttaaacccagggtagacccatgtatgagagaaagggaagatgctcttgggcacagactgcaaatgacctggaatgctaagctaagctgggatgtaatcaactgggggtagcaggaggtcacaaggggtaaggcacagcagaacacaggagaccagcacctgagcaggcagccaagggtaagtggcaggaggtcacataagcaggcaggcagcaggccaagcccaggaggcagtcgacctcttgacacccctgcatttcattccttgcagccaggcagagtaggaaggagccaaagagttacttctgggaagactgggccggagctctggagaccacccttctctacagatgccagcccccaaactttcattgcccttgactctgtttctgccatattccagagcatgtcggttaaggaataggtgagtggagtctcattttgtttttgctttgcttgtctgccctgcttcaatcacctaaactcattagagaatggtcaagcccacagcaatgatgaggaaggcacgcttgcgttttctgggctgtagtttctggatgcagtcatgtccaaggcccagccagcctccggcaagcccgccatgctgcctgtggggtctccctctgccaggaagggcacttctaccctggacagtcccagctgcagccccaccacaggatccctcggctcttcacgctccactgagatttctcaattgactgtaacttccttttcagaaatcctatttggcttcaaagttacagaagattgttctccttggggcctgcagagatgttcaaagtatgcctcctagggatgaccggaatttgcttgaagtgttaaaagaaaaccacaaggcataataacacaactattgtccttgaccctcagatgcaaaaattaaaatcctcattcataaagcaattttgaaaatctcatggaaatatattctctttagagctgaggccaaaaaaaattaaaaatttcctccccaaaaggaaactggttagcttggaatgagagacacaaaaggcacagacagtaagagaagattatcaaggtacggaggccactctaggtctctcaaccccaattccaagacttcatagcccctaacatgggagaagaccagagacccataaaggaatgaagtctggaatataatttctagtggaaaggagtgctacaaagaagggattaaagcgtgacaaggttgggggttgatattgtaggggtcagcgaggacactttgaggaggtcctatcagagaagaaagctgaaggacaggagcaaatgcatggtgctgaaaagagaaggaagagagaaaatggaagatggggctgaggaaggtaatgaagttgaggggaaggcaaagtcaaggtagtgtaaggcaggagtttacaaactgtctctgtaaagagctaggtagggaatatttcagtttggtggccatacagtctctgttatatctactcatctctgctgttgtagcgtgaaaacagctccaggcaatatgtaaataaataggtgggactgcgttccaataaaactttattgacaaagataggcagagggctgaatttgactagagggctggatttgactagaggcccatggtttgccgacctttgttttggagccttgtaggccaggatgagaattttacttttattgttaaaggaatagaagccatgtgggggttttaagcctaagagtaaagtgatgtgatttgtgttttagaagatcattttagctgtcacatggagaaaagattgtaaggcaagagcagaagcagggagaccagttcaaggcttttaaagttctttgggcaaaagaggctggagactgtatctaaagtgtctgtggcaggaattcaagtgctcacccgcatctttagatctcccccttgatccatgatggaacccttcctctcactcctgtgagttttcatgtggccatgtgatcagctcagccaataaaatgcaaggagtagaagaccttaagaactagtgcatgattcagtctgcctttcccctaccatggtggtttataacttctaggcactcatcctgcatatgcaacctggaacttaaaaataaattaagttaaaatataaaaaataaaataaataaattctagaaactcttgtcagtgtgggtccttgagtaaagaacacacggagcagagcctccctggcaattccatggacctgcagtgcacacagagcaagaaccaggaataagatttgtcattttagcccctcagagttagaagtgtctgccgctgaggcatctcccagctcactatgactgccacagtggcaagctgggaggctacattttcaaggtaaagatgacaggacttgctgataagttcgctgtacagtgtttgagaagaagagaaatggaggatgactgccagggaattcgtcctgaaccactaggtaaccaatggcaccaattagtgagaaacagaaggctgggggagggcctcagggtctaataaaaactgtctggtttaaataatggttcattacctactaactttgtaacatgggcaacttaaccagcctctcttggtacgtttgtctgtacaatgaggataaaaatagtattggcttcctagggctgtcaggaggactaatggggataattcatgcagagtgcttagcccaggccctggcaaaagggagctccgcaaatggtagctattgtcactattctcgttgtcatctttattactgttatcattatcagtatcttaagagcttgttcattttgagtcaatcccttgtactcagccagttccaggtaccctggaaagccaagttcttggacttagctgccaaaaacagcctggtctggcatgatcctctcttggttctccctccagccttccactggccccacgctggccagaaccctgtgtaagctccagctccctggctgagcttcccatagccagtgagcaacggtcgtccaaagagagtccaaccctgcttccgcctgctgtgcccaactccagatggcctgagctgtattttcagtgagtccagagtaaggagacatccctggctggcatgacgctcgcactgccttttctcttttctggacgtgcccttacctgggtcaagtggcattacaacaggagttctagaaagtgctagaagagtgtcacaagtcagttccatctatctggtcataaaaaggactgaaaacaggctgaattagatggttgcctttccaagatcagagtgccacatttgaggggttttatagcccccgacgcccacagggccaagtccctactctcccagctgtgtacagccacatccctgaccagcccatgttcaacaggggttcagtgcaggggcaaaaggctcgttcccctgactccctgcctccatttgggactactccaccgggccatgcctgctccccttgtgactggccgaggtacctgttggaagtgccccgtgcccacctcctctctctgcccatgccttctctgcatttcttcccaggaaatttcttgcatgcatagcttagacccagagcctgcttcccaaggaaccctgtccatgacaggctggttccagccacacaggacaaggacttagatcaaagtggcctgccacatgttgatccacagggagggactcaggtctcttatcactttaaaacaaacctatttagaagagaaaaatccttagggttaccctggtcactatattcaattcttgccctgtatgtgctgatgtcttgaggaaattcagtgtctgaggccaccaagtgaggccagccccatagtgcagcagagtcacaggccccaggtttcctgtgcaggctcttggccctgtaaagcaccccccttccaccagcaacattccccctccacccactggtctttatcttagcactgaaactcacttctcaagtgaaaagcacttcctgcttgtgggactcttcattcctgcattagcaggtgcagggagagaatgaggagctcctcccccttcctttcacaatctgagaaggatttagataggtgagtgtgaacctctggaaatgatgtgcaaaattataacaacaggtttttttaaaattggagagactgagagagtgttaattgcttttatcacattcttaaaggcctatgagcctaaatagatgaagaacaatggctgccttgaggaaatcgctgagccgctgagctgcccagcccctggaacagaagagagagcccaccatctccggccttcagcagaccagccacccagctgagagtatttacttttcttttataaaaagttttaatcaaaagcaaactagggtgttgttttttgttcattcatttgtttgcttgtttgagacagagtttcactcttgttgcccaggctggagtgcaatggcccagtgtcagctcactgcaacctctgcttcctggcttcaagtgattctcctgcctcagcctcctgagtagctgggattacaggcacccgccaccacgccaggctaatttttgtattttttgtagagacgaggtttcaccatgttggtctggctggtcttgaactcctgacctcaggcaatccgcccatctcagcctcccaaagtgctgggattacaggcatgagccaatgcgcccagcgtgttttgttttgtttggagacagggtctctctctgtggcccaggctggaaggcagtagcatgatcatagctcactgcaggctccaactcttggactcaagcaatcctcctcagcctcagcctctcgagtagctgagtgcttagagcatttaaaatgcaggacaatgttttgtgagttatggataaacacatgaacatgtaacacttgataacgcacagtgttggccctccttatgcatatgccccaagcatgcccggtgctactcgaccaccccgggagccccaacaggcaggactcatggcctccttcttcctagtgagagattgtggctcatttgggtgaagtggtgcacccatggtaacacatcttaccagtgagagagtccagagcagagcagcccttggacagttgaaggccagctctggccttcagtgaggaggcggtggggtgagggaagacagattggtttcagggtctagccggggcttcctgcctgcatagcccagagctagtagcttcaatctcatacaattaagggcctgctgcctaattaaaccagctagtgcctgtaagcataaggacaagactgtgggccatcagggttagagctggggctcctcccctctggccaggctgcctctctcccctgggattcctgatctcctggtgtgtgcagacccaaagctgcctccttccagtcactgtcgtcaacagccactgtctagaaaggcttggaaatgtccgcggcacagcgcagatgatattctccaaagatgacaacagtgttgcccatccacacttttctgcaatgtgacctcccactgcctcatgggagacagggtctatggctcctcctctcaaatctgagctggtctctgtggctcacttataacccacagtatgtggcagcagtgatggtgagtgactcccaaggtagctcagtgaggccaggcggctcccgcttgttctcttgggatgttggcttcctgggtgttgtctcaggaggctccctttagaacaccagccaccatgctgggagtagtccagacccatggaaatttacctgagttacccagttgacaatcccactctaagtccaggcttgtggtcattccagaccaggtgctggacctaggagtgaagagcctccagcgaagtctggccctcagcccttcaagtcatgtccagctttttgtgtctctcagccgaagtcagagatcatggagcagagacaaaacagccctgttgttccctgtccaattcctgacccacgcaattcgagagcataatgaagtggctgttgatttatgctactaagtttgaggtgctttgtcacaagaggggagcatgaagcacttggcagcccatctccccactcctctctccgctccctctgaaaggtgctggtgaatgcggaggtagcctcttctctctacctgtggtggctccaggaagacccaaggcccaagccatgaggtgctcacatgctcagatggaaatggcatatggggtggtccaagaccccagccggccaggcagaccaagatgtgcagccccagaggctgcttgtctccaacctgtcctgtcaggagctgcaggggctgcctccagccatccagtgtgtggcgtgtaagaagagagaccagtcctgtaacccacctcaaactgcgccatggcccagctctaaacatctggctggagggcaggacacacaggacatcctccatgcatctcattttcccttccatctgggcccccaccttcagaatgcaagaccccctctcacagggtgaagggggcaggagccaacctgaaggaacttcgcaggaagggagggtgtgttcacatacaaggacagtagccttgctgctttacttgctatggtggcccgggcccaggaggtctaggggctaacgcagggaaatttgtgaataagctagatctgagatcacattgtggtgttattattttcttaggtgcgataatgatgttgtggttataatgggaagatatccttatttttagaaaatgagagctgaggtatccaagggtgaagacatgatgtgcaaaacattgcaatggttcaataaaaataaagaagtatacagacaggcagacagatgcacacgtcactgtggctgaaggtaaataattgttgaatctgggtcgagagccttcaggtgtttattgtactattcttttaactttgtgtgtgtttgagatgtttataaaaatgttgggagaaaaacaaaacatgtctaaagttgatggatagcacgtcatgatgtcgcttgaagattcccactgttatctccgccttgcttgaaacaggaagaggaaaacagaaaaaaatgaaggtagacccatgggaaggcccagagcataaatattttcagtggatgattgaaagggaacccctctgtgtgtgtggttgtgtgtatttgcgtgtgcgtgtttgaaaatcagaagtaatttggaattacaacagcttatgaaaccaaagctcttcacacacattattacatgagggaccttctcctagccccacctgggctttagaaactcccttcgtccaccgtccacaaccaccgccccaacttactttggctgaatgaatatccccacagttttattcattcggtgtctgatccaatgaccttaataagatgtatttcagtgttaatcaaagctgttatgagatagttattagcgtgtgcccatagtaattttcctagtgatttgaatttccatgagcactgaatggttatgaaatacaatatttaggaaatatatatcaatgaaggcggcaatgtccacaggttgtaagtcaaccactttattaggagagataaatcaagaaagactgggtgaaagaccaaagacagcaaatgattacagcctgcgtgaaggacaggggagtttgtgcatgtgagcgtctatgttatgcacacatggagcactcgtcagtaattaggtgtatggagtgtagaccttctcgtttctgatgtgcaagggaatattaaaatgcatgaaaagtgcttttaccacaaagttctattaggagatgtaattaatgtgaaagacacatattgcactccctttctcaagcattaaaggggaagactatgctcagacctggagatgtcgtgaaaaacctatacccctcaatcatcttaagaaactgggggtgggccgggcatagtgggtcacgtctgtaatcccagcactttgagaggccgagtgggtggataacctgagctcaagcgtttgagaccagcctggccatctccactaaaccgcatctccactaaaaatacaaaaatagctgggcgcagtggcacgtacctgtaatcccagctactcaggaggctgaggcaggagaatcgcttgaacccaggaggcagaggatgcagtgagccgagattacaccactgcactccagcctggatgacagtgtggagctcggtctcaaaaaaaaacaaaaaacaaaatgaaacaaaaaaactgggagagtgtgtgctgttttaaaattcaggttgcttgtctccaagccatcccttcaggagctttagggactgtctccagccacctagtgtgtggtgtgtaaaaaagcatatcccatacccagcctctaaccccagcttttgggatgcaaggcctataatgtctcacagggtggaaggggaagtagctaacctaatggaatctggcatgaagagagtccttcctggatgcaggggctttgtccctccaatacctgctttctgcttctcaaatttgggcttcaggagtgtggcttgctacccactgaaaagcctgcctgctgtcacagagacatctttatgggcccaagtctttacagaccctggacccagggtagggggcatttcagaacaggtatcttaggcacaaaaggtgtaattcccttcttgagtgtcaggccatcctcatctccatcctttcaaccagctggccagcatttgggaccacgtttttcagactcctctagctgcagctgcccctcgctctcacccttaccctcttcgtctttgggagcattttcaaagtatttactacataaagacatacatgcaacatgcacacacattcacttcaagattaggagtaaagaaacaaataggagcccacgtgttcaaaatttattcctttcggtgggttcttggtcttgctgacttcaagaatgaagccacagactctcacggtgagtgttacagctctaaaagatggcgtctctggagtttgttccttcaggtatttagatgtctccacagttttttctttcccatgggttcgtggtctagctgacttcaggagtgaggccgcataccttcacagttagtgttacagctcttaaagctggcacacccacagttgtttgttcctcgttcctctcggtgggttcacggtctcgctgacttcaaaaatgaagcagcacaccctcacactgagtgttacaactcataaacgtagccaggacccaaagactgagcagcagcaaaattcattgagaagagccaaagaacaaagctcccatacagtgaaagacgaccagacctgggggccgctgcgtccacagtggcccacttttattcccttatttggccccacccacattctgctgattggtccattttacagagagctgattggtccattttacagagtgctgattggtccgttttaacagagtgctgattggtgcatttacaaacctttagctagacacagagcactgtttggtgtgtctacaatcctttagctagatagaaaagtccccaagtcctcacctgacccagaagcccagctggcttcacctctcacaagtagggtgggggctttggttctggctgtgctacattttaactgtccacctcataaccacccaggggattccacctccctgagccttagtttcctcttccaaaaagtggcgaggcagtcatacttgctgcgtgtggttgttatgaaagttagctgatgtgaagaagctctggccctgcctggtctggcataagccagactagcacccgtgtggaggtgtcatgtcacagatgcaacagtccacagaacttggttataaaagcaaagggagatgttttagtctctgtaatggatcttagagcagagatcttcagatggatttgagatccataaatgtaatagtaccaagtcaaagtaacttagtcacttgcagtttaagactccactctttcatgttaatacagctgcagtaagccatccttgcactgccataaacatctgaaggctgaggcaagaggatcacttgaggccaggagtttgagaccagtctgaccagtatggtgaaaccctgtgtctacaaaaaataccaatactagccgtgtgtggtggcacatacctgtaatcccagctacttgggaggctgaggcatgaaagtcacttgaacccgggaggtggaggttgcagtgagctgagatcaagccactgcattccagcttgggcaacagagcaagactccttctcaaaaaagaaaaaaagaaaacaaatgaaacacctgagactgagtaatgtataagaagagaggttgaattggctcacagttctgcaggctgtgcaggaagtatggtggcatctgcttctggggaggccttggaaagcttccaatcgtggtggaaggcagtgacggggcaggcacatcacatggtgagagcagaagagaaagaaggggcggggtgggtgccacacacttttaaacaaccagatctcctgtgaactcagagtgagagctcactcatcaccgagaagacagcccaagccactcatgagggatctgccccatgatccaaacagctcccatgacccccacctccaacactggggattacaatttaacatgaaatttggaggggacaaatactgaaaccacatcaacatctttggtgaaaacccagggattctctctttctgttctccttcctctctgactcccaagcgagggcagggcactgggatcacttcctgtctggcttcctacccctagtgggatgagtccctgatctcacctccttcttgctctttggatccctcctcaatgtgggtggtctgtggggtttgtcctggggccactaagagaccccttgtccaccagctcactggcatgaaagaatgcaagagcctctggtggcaaccgtcctccacatgggaaggttgttgtgtgtcccctaccactgagctaggacttcagcccgtctcccagtaaatcttgtgggacaccaggactggctttatgtgtgggtaaccagcacaggccacaggtcctgctctcagaagggccctgaatttggggcttaatgcactgcaactgctgagtgccctcaggaaggtcttcccgatctttgcacctgtgtttcctaagtgaagtcagatagacgatagagcatacaccgaggcacagagcctcggttcgcacacagccccgctacccattgccttttcctgcctcccaggagaggttcttggccatctggtcacctgccccagcatttcggatccttcccagacacccctttcccacttccaatcagcaacagctaccaacctctgctcctaggggaggctgggcatgggggagggctgaggtctggtgtggatggcccagagcatcttagggtggggtctggcagtggcacattccagctgggcagcactattgtgcattcaggaggtgacctggcaggtgtaagcccctcactgaccccctaatccaggaactagagcaccctgttgtgaagattgcaacatcctggggtctcctacccactgtgagttggggagcaggcttacggggagagaagacaaggggctcactgtacccatgcctggctggggcatggtgcatcagttctgtggctggtgggagtgggaacaagctgggagggtctgcactcactccgactgtccccatgcctaagggagaaggagattcagtaacaaacagaaaacgtcataaagggaaaaagagagaggtcgtgaaagagaaaaatctttactttttttgttcctttaatggccctttttctgctttttgaacaagaggtctgcattttcattttgccctgcccctccctccccccgttaatattgctggccctctagtaaaccttataaaccctcttcttctctcaagtgccatgggaattcctggttgaagggagacgtggccctacattccctgactgaagctgcttttgaagacaattgggaaggtcctcaaaaagttatacattcagttgccatatgaccaggagtttcagtcccaggtgtatacccaagagaagtgacaaaaaatgtccacacaaaaacttgtacatgagtgttaatagcaacagtattcataatagtaaaaaagtgggaacaacctaaatgtagatcaactggtgaatggataaatgatttgtggtccgtccatccagtggaatattattcagctcttaaaaaaaggaacagagtactgacatatcctacaacacggatgaaccttacaattgtcaggctaagtgaaagaagccagacacaaaagcctatatattgcatggttttatttgtatgaaatggctggagtcagcaaatctatagaaacagaaagcagataagtggtttcctacagctggggcttgggggattatagctaaggggtgcagggttcaggtgatgaaaatactctgaaattgacagtgtcgatggttgcacaatgctgaatataccaaaacccactgaattgtacactttaagtgggtgaattgcacagtaagtaagtggataaattgcgtagtgagtcataccttaaaaagctgtctttcaaaaagatatgtgcagttttacttgacaagcttgttgcattatctccccagcagccctgctgctaaagggcttacgtgcttaggaaacaactggacatgaagctctgacctccccatgcccttaccacccccagccccagaagtctctgtcagtatgattgcttttgtgttgattctttctgcttcctggaaatctagccaagcccaccccccactggcagaggcccagtgtgatggggtgtgagtctgtttagaggctagggcttgccagttgccccaggacatgtctgaccccaaggtgtgagaggagcctgtctggagcccactcacactgctctggcccatgtgctctgtgcaaggtcacacttccatgcctaaggtcacacactcaggcccctaatgctggcaaagcagaggaggatcagcgtcctgttcagcagactcctggcagttcagaccacatgatgagggaaggcccagaggacaatgccaaggccccatagtaatgacaggtgaagccagctggacttctggatcgagtgaggacttgaagaacttttctgtcttaaaagaggattgtaaaattcaccaatgagcactctgtagctgaattgtaaaacgcaccaacgagcactctgtagctggattgtaaaacacacaaatcagagctctgtaaaatgcaccaatcagcgctttgtaaaatgcaccaatcagcaggatcctaaaagtagccaatcacagggaggattgaaaaaagggcactctgataggacagaaacggaacatgggaggggacaaataacagaataaaggttggccaccccacgcccccatcaccagcagcaaacttgttagtgctcttgcacgctgtggaagcttccttctttcactcttcacaataaaagttgttaccgcttactctttgggtccgtgtcatgtttaagagctgtaacactcacggggaaggtccgcggctccattcttgaagtcaggcagatcgggagggttatggcaggaacagactctggacacagtaagatgatcactcattctcagaaaaggatgcagggtccctcaggagattcagggccacaccctcccatctttggggatgtcacagtggcttgcagattgggtggaagaaataagtgcttgctgacttccagggaagctgggctccagactcttctctcttaattaccaatgcaagtctgggcttcccctcttgggaatcctcaccccgtccatgcttcgtcacaaccttctgtgataggtgatgaggcaccacgcagggagtactggacagagccatcagagcagcagcactagacgccatgcaagggacatcacccaggcaatccctgaaggcagacagggagacttctcaactgcagtgggtgaaataatctcccccacagcccccgccaaattcgcattcttcttggagtgtcagaatgtgacctcatttgtaaatatgattgttgtagtataattagtaaagccgagggtatagtggagtatggtgggtccttaatccattacgactggtgtcctcacgagaaaacaaaaagaggcagaaacagacacacagggagaatgccaagtgacagcagacgcagagactacagcgatgtgtctgcaagccaaggaacgtcaaggattgccggcaacaccagcagctgagaggtgaggaagggtcctcccctgtagacttcagagggggccgggtgctgttgacatcttgatttcagacttctggcttccacactgtgcaagaacaaattcccattttttaagccacccaatttgtggatatttgttacagcagcccaaggaaattaatacagcagtcttcattcctgaagcaataaaatgagcgcagactgcagcaattattaattcagccaacattgatggaacacataagcatcaggctctggactgggtgctgagaaaagaggtgaacaaaagacgtgatgtttctctactagcaatttgcccacaatagccacagaaaaacagatcattaaaaattgtgataagatctatgacgtaacatcatggggaagtgtggttgggatgtgggaagccggaaaacctcccggaggaaacgtcatttattccactgagacctggagagagaggagatggagtgggaggaagacttactgagtaacatgcatgtttgtgtcatgttaggactttctgaccttgctcttgaggtagatacagtaaaacactaagggaggcgttaaccacgtcaaatatcggggaagtgcactgtaaagaaggagctgtgtgtgccagtgcctcaaatcaaaaaggactggagtgcagctgtggaagtgagaactagagagtctagcgagggagccggcagaggacgggacaggacctgtgtgggggctgcagaggcggtagtgggtctggtaaatataacaggacaggatcgtttccactgtccatttcccttccatcctatacttaaaggttcagcatgggcacagttcatcagcacggggctcttcccagctgatatgtccagatccacaggagtgagtgtgagcaccagggccctgctggcacacgcagcctcccagcctcacacgcagccacctggagtaaaggcttggctttttaactctgctgtgcaatagttcatggttgctttaacacagtgtaccaactctgaaaagtttaatggagccatcttcgttaacatgtgtctctgacctactgttacttggtaagtagtgcattctccaattcataaaagctgaatttgaaattgtcaagtccccagattacagctgccaaactgcctccattgatgtcatcagtctccaacctgactgaaagcaggaacaccttcgtccctgctcagtgcatagcatacacaatgccacaaggcctccttcatccccatgtcctgctttaacacacagcgggcatttacatctttccttctgcttcagttaagcagtgtctactctatgggtcccctagaagctagtactggcctgttgtgacttaacatcacccagtagttccatacagacagcagctgaaacacactttccatcttagaaatcataatatgctccctgtttcctggaaatggacggtgttagatggttcatcattgctccatcttccaagaaaactacacatgcaaactctgctatgtcctgttgagaggcccctcattaggggcagataggagcttcgcctgaggttatattatggttaaactattgcgggtaaccaatccatgtctattgagaccatgaacaacagaaatgaatttataaaacaaataatgccttcccaaaccctgtatgtaaatgtcacacatcaatctccccattaatctccccccgggcttctgggatgttgaaaggagttctcagaggaaataatgtttttgccctttccttttatttggaaaatcaaaaccaagccgggttcgaatgaccagcctttgaaggaaggaaacagtgtttcaccactgtagcttggacctcgcatgcaaaaagtgtgcaagcctcttctccctggtcttctcttccatttccacgttgaggatgcctacaaacaaaacagagctccgtgctcaggggaggagcttctggaggcccagaccccatggacactcaggtggttgttttaaatggtaagaagtgataaagacgagatggacactggagagacacttaggggcatgggccagctttgtaagtggtgttatatcctggctgcagtaagggtaagagtcacagcagctataggttaagaagcaggcagtgatatagaaataagagccaaaggtggagggtgttttttcttttttcttttcttgttgttctatgtcttctattaatttggctgtgaaaggggaaaaatcaagatcagattggtatttgaagagaaagcttggggttgcaggaaggagtaagtgaaggaatataattcccggccggggtcgggggcttcagaaagagagagatggaaactgcaccaagaaaagagtgaatgggctcaccccactaggaagaggaggcatctcactcagagactagaggccggtaaagacagaaaagatcgaaaacctctgaggtttggggaggatgtaagcaaattcttgaagctcaaattaatgggtacaaatattgaccagttgtcatattcagtcaccatgctcaaacgccttccacttcacaaggaattcatctctggtgtttctgttatctctcacagtgagaaataaagaataaataagaagaaaataatttttttaaaacaaatatcacaaaggattaatattcttaatatatagtctctataaaatttagtatgaaaaaaggaatctaaaaggaaatgcatgaattataaaaaaagagaacttctagattcagctccaatacataaaaggcctggaaatcatctctcccatccttacaacaagaaaaagctagaacactgaaaatcaaccagtgttccaggacctgttggagactcaagggctcagggaaaacctccacctggaaacctggagagttcagcagtctggagtcctagttgggctcagctcacctcgagcagaagccactagaaccacagactggtgggaacacttaggtggtattttgaggaattgctgggaactgagtgtggagtagaacaaaaatgagaaactctagagggctgcagtcttagaggggtcctcattttcatgggccttaagtctaggagccccacaaggtggccatggtgaagatctgagaaagatccccttgtacatcttgcagaggacagggaagtgactttctaccaaaaatacaggatggcaaaggatttttttaaaagagtaactttacagtggagaaacctggcaaacactacttgggccaggtggtcaaggtcactgtcaacagtgataagtcatgtggatagcatgttccctcgatatggtgtgatgataatggcactttactgttgtgggcttcctcccaagaacccagaccctagcacaatcatgagaaaaacatcggacataccccaactgtgggacattctacagaattcctgatcagcactccttaaaactgtcaaggtcatcaaaaataaggaaaacctaagaaacctttacagtcaagagggcctaaagagacatgaagacaaaatgtcatgtggtatcctggataggatgggaacttggaacagaaaagggacgttaagtgaaaattaaggaaatctgaatcaagtatagacttgagttaatggtaatgaatcactgctggttcattagttgtagaaaatgtgccacactaatgtaagttgttaacaataggaaaaacagggtgtagagtacatgggaacttggtaccagcttcacaataattctataaatctagaactgttataaaattaaacgtttatttttaaagtaagaaaaacatgcagtatctgaataatcaaataaatataaattaaaagtaagaggtgtaactttttttcatcaacacattcatcaaaacttgaagttcaatagtaatcaatcctggcttaggtacaataaaacatactttcctggattgctgtcagttagtataatgatttagaaagcaagctttgcaatacagttcaaaaacacactaactcagtaactctatttgtaagcatctattttaataaaataatcagaaagcagataaatgattacgtataaaattttgcatatttgcctcattaaaaattgtaaaaataagtaaaactgaaaaactaggaaaaagacatcatagtaattggtatgggagatactgccccactgggaatcatataaaagccaggctgaacacagaaaacaactgtttcctgagtttgggcagcagacaccccctggtgtggtctctgaaagaagagctcacccgagtgggtaccacctccagattggctttccccaaggatgcccttcaaagtgtaacccatggagatagagccagggagagacagtctgcttgatcaccatgcagggctcaaaattgttcaatatttgaaaatctgtcaaggaaatattttcagttagcaagttaaagaagaaaattcataggatcatttttaaagatgtgggaaatgcatttgaaaaaaatcaaaacccatttataataataactttgagctgaacaagaatggaagagaaattctttagggatgggtatatgctgaagacgctatcaaataatgcactgaaaggtgaatggttgctgtattaccactaaaggaagaaggaaggaaaagaatgtctctccccatcaccaccattaaatactcaacatatattgaaatgttcgtcaaggcaataacaccagaaatgtttacaagagatatgatattggagcaaaagatctaacgctgacatcattagcagataataccattacctaggaagtccaagggatttgtctttaaaacatactataaccaataagacgttcagtaacatctccagtaacacctgtgtgaataaaattatgacttcaattaaaaaaggaaacccaaataaatagatgtgctgtgtttctaaaggaaagacttgatattgtgaagatatacattctcccataattaacctatacatttttgagccattccaataaaaatccaaacttactatctacaaaatatgagaagctaacccaaatttcacctgagtgtgtaaaccagccagggttacagcaaattctagagcaggggagtgagtcaacaatggggcaccagatcactagatatcaaaagataaaccacaagaatcaaaacagaacagaattagccaaggaaaagacaaatcagtgaaatagaatacacagcccagaaaaaaaatattttaattcaatgactaaggaataatgaaatagctggcataggcataattgggatccacctgtgtgtcagatcaaggatggctccagagtctagatatgcctgccatcaagaggtggggtctctgcctcctccctttgaatctgggctggattttagttgctttagagtatgttggaagtgatactgtgccagctccagtccaagtctttaaggcaacagcagattctgtttcctttctctggtagccctgtgctgtcctgtgggaagtctgattgtcctgagttggccatgctgtgaggaagcccaggcttgccattggtggggggccatggggagggagaaaggggaagttgaggggccagcccatgactccttcctcctccatcccagctgagtgccccaacattgtggaccaaaagcaagtcattgctgctgtgccctgtcccaattcttaatccacagaatcatgtgaagtaatggttgtaaattattggcttgagggtaaaccaaattaggggatagtttgtcatgcagtaatagctaaccagaacaacttaggggaaaaataagttagactctctttctacactataaataagttccaaagggatttaaatatataacttacaaagcaataaagtactagaataaaactaagaagactgatagtttaccttgctaggaggtgtagaaaaggcaatttcatacattgttagtggtagtgtgaattgctacaactttttggagagtgatacacaatatctattaaaattatcaattctgagaatctagctatggaaaccaagttcaagttcttatcaatatataagactctctgtaagaagatgcctatcacagcatagttataaaaaaaacaatgaaacagtttggatggtggaatcaattgcatcctatccacacaatggaatgttatggagctattaaaaacaaaaatgctagatctatgcttatgaacctggagggattttgtcttattcagtttgggctgctataacaaatataccccatagatgggtgttttaaacaacacacacttgtttctcacatttctagaagctggaaagtccaagatcaaggtgctggtagatgtggtgtctggtaagattagacagacaccttctcattgtatcctcgcacggccaagagaaaaatctctctcctcataagggtcctaatcctattcctgatggctcaaccttcatgatctaactacttccccaaagccccacctcctgagaccatcacactggaagtttgaatttcagcatatgaattttggggagatacaaacatttagtccaaaacagatctcaaaaattaatttaaaagtagtttcacactctggaagatgatttggcaagttgttaacaaataaacatgcaattatcatatgacccggaaacttcattcttggattttttttcctgagagaaataaaacttgtgttatcacaaaaacttgtacacaaaggttcataaaagctttattcaaaatagccctaaaatgaaagccaggctagatgtcctttaacaggagaatactaaacaaactgatgaatccatggaatgctactaaacaatgaaaaggaacgaaatattaatacacacagtaaataacctggatgagtcagcaaagaattgtgctgaatgaaaaaagccagtcccaaaagattatatactgtatgctccatctgcacgacattttgaaataatgaagctgtagaaatagagaacagattaatggttgttggggattagagattggaggaaggtggacgaatgtgtgtgtgaggaaggggacaagaagaaggtgaggagtaatgaaaaggcaacaagagggtccctatggtgatgaattgttctgtatcttgactgtgatggtggccacaggagcctacacatgtaatgaagtagtgcagaaatacacgtgtgcgtgcgcgtgcacacacacacacacacacacacacaagagtacaagtaaaaccagggataacatcaatggattgcatcactgtcactatcctagatgtaattttctactacagcttcacacaatgttatcctcggaggaaactaggtaaagatacacaagaactctatattatttttcacaacttggaagtgaatctatagttaaccaaataaaaatctaaattaaaaaccttttaaaaatattataacaaaatctataatacagtaaaaaagtagctttcagaggtatttaaatatcatcttcccattttggtaaaacaagacaaaatgaaacttcatatatttgaatatatatttgaatgagcacaaggtgtgatagacagagctcaaactattaacactggttacctatggaagccgggatggaggagaaaagaaatgacattatcaagttatcaagatgacattatcgacatattctatgttgacttttttttgctacattaggatgcatttttataataaaaataaatattggaaagagctaaatgaaaaaacaaaaccataaaagtgatagggaaaataatatattatttttacaagtttagggtggagattccctttccaaggaaggaagattcaacacccagaagccataaaggaaacaactaacagattcatctcataaaaaaataaaaactcccacagatcaaaacacatcataaagaaagtttaaaaacaagtaacgtggaattttctaacaaacgaaagattagtagccaaaaattgtccttacaaatcacaaagagaaaacaatgaaatagaaaaattggtgaagactttggccagaccactaggataaagcaataatgttgactgctaaaacagaaatctttcagccttggtttggcctgagactctgaaagtcaagaacaagacagcaggtgccaactagccccagcgtctacatgctggaccccgatgcaagacctgctcagaggatgatctaaccctccacctcttacccaaaggagaggcagagggagacagggcttcttgtgaagagttggcagtggcccccgaggttccttggagacacacatgggcacacacacgcatgcacactcagacacacacggaggaggaaggcaatctgcttctcagcccatgccagagggcagtcacactgtgagaggaactccaagatgggtcaccaggagaatgtgacatgcgtccctccaaagactgaaggtgagggtacgtggctatgtctgctctgcccaagctggcacaaggggaagcaaaggacagtgaagagaggggaaggacctagggcatctaggccccaaattacaggctgatggtggcactacgagtggccccagtgaaaggccttccctctgtcaagaaaaggacaatctgggtccacagtggattgggccttcatcagcccccaaagcatcattcaaagagagcatcagaaattgcacccagaagtctgaaaaaccccaagctgtatgacatcagccactttgtggccttttttcctaatcctttctccttcctgagtccagcttaagaaggataataagcagttcctgttgagttgggggaaaagaagggtgagaacagctgagtttctctaggcatctcctgctggaggctggggaagctttcactgggatgagagcccagagtcagatttacgctggtcctgactgtgctgtgcggtcctgacagtgctgtgcgatcctagactgaccgactagactgagccactgaaaatttagtgggagttgccccagattttattgaacagcagggaaggaaaaccaggagagcagattggaaagggcaatagtgagaactacagaagcggtcctccacttggcccccggtgaagtcccctggatcctgtccagaaaggtcctcctcaccagcaatcaaaaaaacacaaattaagacaaaaatatgtttctctcgattcagaggggcaaatatgcaacatgccaatgtggtctcaggatggtgaggaaattgctcatgcatcactgaagagcctgggagtgcaaaaactccctccagaaggcaaaatgcagatttgctgaaactaaacttacactttacaaaaatcccacttctaggaatatgttctaaaacatctcttgtatgtgcataaagttgaatatagattcattgcctcattagaaaagtgcaaatttagaacaatctacgtttccatcaataagggtggctaaacaatcatatgaagaaagctctacatcactgatcattacagaaatgcaaatcaaaaccacaatgagataccatctcacaccagtaagaatggctattaaaaacaaaaaagaaaacagatgctggctaggctgtggggaaaaaggaacgcttatacactgttggtgggagtataaattagttcaaccaatgttgaagataatgtgacaattcctcaaagacctaaacaaagaaataccattcaacccagcaatctcattacagggtgtatgcccagagcaatataaataattctgttataaaggcacatgcacatgtatgttcattgcagcactatccacaatagcaaaaacatggaatcaatccaaatggccatcaaatggtagactggataaagaaaatgtggtacgtatataccatggaatactctgaagccataaacaagaaggagatcatgtcctttgcagggacatagatggagctggaggtcattatcctaagcaaactaatgcaggaacagaaaaccaaatactgcatgttctcacttataagtgggaggtaaataatgagaacacatggacacatagaagggaacaacacacactgggcctgtcagagggtcggagggaagagggagaggatcaagaaaaataactaatggatactaggcttaccacaagggtaatgaaatgatctgtacaacaaacccccatgacacatgtttacctatgcaacaaacctgtacattctgcacttgtactcctgaacttaaaagctaaaaacacacacacacacaaacaaaacacgatgactgcatacacacacagaataagatgcagctggtaaaaagaatggctctatcttctgatataaaaaagtctccaagacacaggaagtggcaaaagcaaatcacagaattgtatccaatgtatgacactccttacattaaaaagcaaatataggccggccacagtgacttacgcctgtaatcccagcacttttgggagggcggatcatgaggtcaggagatcaagaccatcctggctaacacggtgaaaccccgtctctactaaaaaatacaaaaaattagcccggcgtggtggcgggcccctgtagtcccagctacttgggaggctgaggcaagagaatggcgtgaaccccggaggtggagcttgaagtgagcgaagatcatgccactgcactccagcctgggtgacagagcaagactccgtctcaaacaaaacaaaaaaaaaagcaaatatatatgtatgcgtgtgtgtatgtatttatatattcatacatatataaatatgtaaaaaataattagagaattctcatcaaaatgttgccagtggttacctctgggaaggtagtggttacctttgggagggtagtgggtacatgtgaggagaggttttttgtttttttgtgttttttggagacagggtctcagtctgtcacccaggctggagtgcagtggtgtgatctcagctcactgcaacctctgcctcctgggttcaagtgattctcgtgcctcagccgcctgagtagctgggattacaggcatgtgccaccatgcccagctcatttttttgtatttttagtagagacagggtttcaccatgttagccaggcaagtcttgaactcccaaccccaaatgatccacctgcctcagtctcccaaagtgctgggaccacaggtgtgagccaccacacccgcctcacgttttttattgagtaaacttcactgctatatgaatcttttgtaatgacaatgtatttatatatgtgtatggtcaatgttaataaaggttagagaagttaaaaatgaagaaagagtactgtggaggatggagtggatgaagggaaaagccaatcagagaagcaccctagggtgctgtagcagtagtccaggggacacctgtggaggctggaattagacatgggcacgggaggagaagggggagcaggtgagcatgggcttaagaggacaactggcacagtttgttgactgtggacatgcgggctgagaggaagaaaatagattaatgtgatgactaatgtagctgatgacaactgtcccacacttcgagcaggggcccagggcaaggagcagggtggggaaggaagcagaggtgagagttcatatcccaggggatacacttctggcccatcagacagtggagtgtgtgggcacacacctcaggcggcagatcttggagattccaatttgtatttctgaacatgtaagtggctttgagcatgatcaaggtgaacaagaatagaaatatggaaggcaccaacagatgatggacagatgaggaaggagatgataactacagcaaaaaggccaaccacaggagaggctgccatttgttgagcaagtgagatatgctgtgtgctgtccctttattttattcaatcattataataatgggaggtgggttttatcatgattcccattttataaatgagcaattggaagcttagaatcaccaaataattttcccaacatagcaaagaatccagctctggctgactccacactcacagcaactacaccacttcgcttctgccgaagcaatcctacttgcactcctccttttggattgctgagaagcatcactatctaattaccataaagccccctcctctccatgcctgctatctttgtcctggtttgagacctctttatccctcccatccctaccttcagtctatcctgcacaggactgacaaagtcatcttccagaatcacaagcatgactacatcagtattctacttaaaatccttcagtaagtattctctctaccagtcgagatgctcgagcaaggaacagagagatactattgtctgaaacaaccacaaagacaacaaaacacatgaaacaatgggtttcttttttatttgtttttgtttttcagcttatattttagattcaggggtaaggaaggattttacctgaagccttagcgggagcatggaccttgagaccttgagtttggacttccagccttcagaactgagagggaatgcattcctgttgtcttaagccacgcagtttatgattctttgtgacagcagccctaggaaactattacaataggtttatagatttcatcagacttggaaaatatttgaccattagttcttcagttctttttctttctcaccctctcttttgctcctctgaggactcaaatgacctgtaaattaggccactttaaattgtcccacagttcactgatgctctgggagtcttttaaagactttttttttttttttttgagatggagcgtcactcttgtcacccaggctggagtgccgtggtgcaatcgcggctcactgcaacctctgcctcccaggttcaagtgattctcctgcctcagcctcccaagtagctgggattacaagtgcctgccaccacacccagctaatttttgtatttttagtagagatggggatttcaccatgttggccaggctgatcttgaactcctgacctcaagtgatccaccccttcttggcctcccaaagtgttgggattgcaggcctggaccactgcacctggcccaaagactttttaaaattttctttctgtgatttctattgctacatcttcaagatcaccagtctcttgtgatgcctaatctgatattaactccatcgtgtgtattttaaatcttatatattgtcttttgtttggatcttttaaatatcttccatgtctgtacttaactttttgaacatgtggaatgcagttataataacagttttactgtccatgtttactaattgtaacatccatgtcagttttgcatcagtttcaattgattaactgtctctcattatgggttgcatttttttgcttctttttttattcactgctagacattatgaattttaccttgtttggtgctagctacttttgtaatcctatgcatattcttgagctttttatatgcagttgaattaactgaaaatcgtttgatcccttcaagtcttgctttcaaattttattaggcaggacaagagctgggtttagtgtaggactaatgatagccacactcatgaggcaagaccttttgagtactcaatgcccatgaattgggaagttctccagtctgtctggtggagacaggtgttgttcctggcagcactccattctctgcctttgtcatcacatgatgtttgtgtctcctcttcttgtgtacaagaacaccagtcatatcaaattagggttctccctaatgacctcattttaactggagaaaccttaactgattgctttctgcagccaaccagaggtaccttcaattttccatttgccacagagaaaaggggaaagatttgcaaagggagcagccttgagtccttttgttactgaggcatggaaagttggggttttcctctcaatttagttctaggaagtcagtgtgaattgatcttagattccctgcctccagaccctgttctcctgcctcaataggagagaaaagctacaacaataagtgaatccgcccaggagatccataattgaaaaagttttagaaaagagaacagagaaagtatatggagtgggggtcagtaattaaagaaaacaataaaataaaatgtatcagattttgcataatgatcatcagcctctagtgtgaaaagacccactgaataacccctaagtgaaatgagatccacgccaaccagagcactccccggataaaagagaaaatcccgaaatatttcagagagggatctggccttgtatgaaagaagaggggtgagaacggtgtctgacttctggtggcagctctgtgagccagaagttagtggccatggcttcaaattctaggtcaagaatctccgaccaagctgccaatcaaacatgaaggtagaataactaatttttgcacatacaagctctcaaaacatttcccagtacaaaacattcttcagaaagctatagagagggaaaaaaacaagagaggacccatctttcagcaactagagacccagcgcagggaaggcaaaggggactcccagaaccccaagacaaccgttggaccaccacgtgtgctggggcaggggcctgggaggatgtcgctaggagaggaagcccagccatgatgcatctgcaccactgcaaagagagcccccttctggcccagagtctagggatgagtgggaagacagcactaaaccaagggaaatcttggcaactgtttattccaagtaaaacaaaaagttgtacaaaataggaaatgtgcactgcatggtttagctgtgaataatacgaacatagtcataactatgtaaataccaaatattgatttggccaaaaattaggctgtaactaccatgatggggttgagacaaacagagagacagcacgtatgcacaggaggatggtgtttttaaagagcgacatcctcctcttccatggtggaagttcatcccgtgacatttaaactggaaaatcaagaaatggccttctaaacttgttattttaaagtcaggaggaaagcaccagaagaaacggcaggaattcaaagtgattgcctctggggaacgggaatctggagtgggaagaggaacgctgtttctcattacaaaccttgaagaaccatttaagttttaaaactacatacatatatgactctgataaacatacatttttaaaactacttacaaaacagcaaggaaaagattaagaagggtgaaggcagcacatttcagactgtttcagcgacttacctccaagtgagtaaatacataactcagtctatgccatttaggcatagacctaaaggggtggcatccagaaatttcttcaaagtcttacttattatctttaaaattcaggcagaagtttttactctctttcataatacatccctgtttgtttttatagtatgtggcatacctggcagaaggttttcttttcctctccttttgccttctttctctttcctgagacacacatcaggctgggatgacagagaaagacattctttcagtagaataaggtatagagggtgcccgtaggattaactgggaagggtgaaatatctgataatttttcagtcattacggactagtactaccaaggccccttatagcatctgctcaccccactgtctaagcctggtgtctctgagcagggaactcagggagcttgaagactggacccccagcacaaggccagggtgggaccctcttgggatcaggcggcagacaaagccctggaggaggggaaggagatggagtccaagaaggaaaagacatctcagtcttagcatcagaaagaccatggggttgctcccaaagagttagacctaaagccccacagcagagaaggaatctgggaaggtgggcttcaaggaagaaagtggagaatcccatcccaattctccaactcctcttgtgaattctggaatcagtacagttgttatactcacagcaaacatcgttcagggtcttcttgcacaacagagctttcaaaaatatgctgtgatttcatcagtttcctttattggccactgatatgcaaagtctatcctgaggctcaggatcccccaagttctcccaaagaccctcgggccccagtctaggaagcatggagatgacaagtggaaaacagtggcatcacacatgggacagatgatgtgatgttggcaggaaaattccctgggatacgacttttgtgggggtctctccacgtcctgccctgttggaggctggaagcctctgtgctctctacctcctgggggggcagcagggcagaaaacagaaggttctcagagagtacccctgttcctagctcttgttcttcaaacgtcaggaagtgtgttgggaagaagaaagaagttagctgcagaagccgggagggaaagaggaaagattgtgcagccatcgagggaggcaaagtccatggctcctggaggagagaccctgcctggctagctgtcggtgctgaggaaagcaacttctgaaagcaactgctagagggaggcatggaatttccactcctgtgcaggttgctgtgaccttggggtccagatgcacggtgcccctggccttgaggagaccaggtaggctgtgttctccacattatagccctaacgggtgggttggaggacttgcttgctgctcttgtgggaccttcataagcccaggattcaaaaggaaccttcaatataactgagactgaattatttccagccaggcagaagtgccagaaattcaaagagtatttgggaagcaaggcatatgcctgccgcttaagttattcttgttgttttgaattatgaactcctttgcttcaggtgatgccccatctggcctggcatccaaggcaggtgagaaatttcctccaccaggctttgcttggcctgggatgaggaattcgactggaatcacactcactccaccttcccacatccagacacaagcagtcacctttagggttttgcctctctctgttccagacagctggttccagagtcagctgtcacaactgaccctgacagctctagggagaattagcaaggcagaggaagggagtccttggacagagaggagggtggacaaggaagagaggagactttagagacaggcacatcccacaacctccggtgttaccatatccagcaggctgactgagccgcactgagccctgggcagaagtgggtgatctctgagctggggctgggtttcatttttcttgtctctctgagctcagccaccaggcgatacccaagttagtataccccacccacactgtggccgtgtcccagtgctccaaacgccacattgaagggagctggtctcagactgcagagctcacatgtgacagacataaccaatggggaagaaagagtcgtcccctcatgagtctgaagccagtacctaaaggagagaatggggaggcggcaaggcatggccccacagcagaggtcggaaggaagagctcccagggttaagaagcaaagccccgagacacagccaccattcccaccaccccagctcagggctacctttgggacccacccaaaactcagctaaggccagggaggaggggtcctcaaggacaagctgcaggcaccaagccctgccatcaggcactggccagactggagtgagaagccctgtgagcacatactcgctcctctacttgttggtcttggttttacgtgtcaaccgaggaaacagggccagtgtgtgcaatcgcctatggttggaggcgtggtggaaggcgagccccttctccccaggctttctgaaaccatgtgggagatctctaccagagtgacactgcctgcctcccatccccaccccccactgctggtggcgatgggacagtccagagtcctagtttgggtaggacagaaccatagaaaggcaaccccccactccggagtctcattccctcctctctgggtcactttgacagtcttgcctgctccagcattctctcggggctgtcggaaaagtgacagggagtgggcacagggttagggaggtgagtgtgggcctgctgctccatcggcagtgccgtgaggaagctgctgctccttctccagttctccatctcctgcatttcacttctcagctagatgtaagtggagaagaggaataatggggtgttatttatgagtcccttaaaacctcaacaaccctaccatgtgtcagacgaggtgcctggagctttgtcaatccctcgtgtcattttgtgccataactctccaggcgggaattatcaccctgtgcatgtgagcctcagtctctgccattcccacccctgcgctctttcctccacactgcaaagtccccatcggtagcagtacacttgtctctcagggcttgggtgagaagccctgggaacctcatttggtgggaagcttttgtcagctgcagagcatcaagcaagccttgggctctagattttgctgtgcctcgcattgctgataatccaatggtgtcttgcctccagctcccgaagtccacagatgtggcagcgatcatggccctgttccctgctctcctcagcccacacgttccccttagatgacttcatcggccacaaggctccaattaccggctctctgctcagatttatgtctcccgcccaggctgtgtgcagggatccaggtgcacacatccaatcctgtgcacacctccctcagccgtctgacagctgccgaagctcccaggtctacatccacttgacatctgcttctccagatctgctcctccagggtcctccagaacatggtactgtccttagacactggcccctctctcaacacccgtgtccaatcaggctttgagtcagggtaggtcaaactgagaactcctggccctgttcacatctctctctgcaaaggccaacatggtttctttgcccgggttatgtgctagcccctaaactagtcttccattcccaccttggccccatcaaatccattctgtgtactacccaatataatagttcttagacacaaatctgatcatgtcacacagtcgtttaaagcccttcaaatcctcccagtgcatttggagggaaactggatggctgacgggggcccaggcactacagggctggcttctgccccttcttcagaactccagccacagaagtctcctttttgttctcagaagcaccggctctttcccatcaaggctcccacacgtgtgtccctctgcacggcctctcattcccacactttgctcagccaactgcggccaccttcagtctcagatggcattagatggcacttctgcagggaagcccatcgccctccagattgacctgagaccccccgctctctggaatacaggaagactgaaaaaaccttactgtgttttgaactgtaatgtgttgtttacacttgtgtaatgactttcttccgtgagggattatggtgccttgaatacagaaatcagggcagcctgtttctcaactgtgtcctcagggccttgggcaggtctagcatgaagcagggattagtaaacatcaatggaatagattccatggaagaggctattaaaataagttgcaaaatactgaatatattggtttttttagtcaactataattttagagcacctgtaggttcacagcaaaaactacagagatttcccttataccctctgccccacacatgcaccgcctcccccattatcaacatctcccgccagagtggtgcatttgttacaattgatgagcctacagtgacacaccagtatcacccagagtccatgattaatttgagtttactcttggtgttgcacattttatgggggttaataatgtcatgtatccaccattgtgtcaagtgagggaagagggccagtgtgtgccatcacctatcattggaggcatggtggaggatgagccccttctcaggctttctgaggccacgtggggagacctccaccagagtgacactgcctgcctcccatccccaccccccactgatggtggtgacagcacggtccacagtcctagtttgggtggaacagggccatagaaaggcagcagctccccaccccgaagtctcattccctcctttctgggtgagtttgacagtcctgccatccccggcactctctcaatggtatccacatcgtagtatcacacagaatagcttcatggccctaaaaaacctctgtgctctgccgatgcatccctctgtccccccaacccctggcaaccactgatcttttaattgtctccatagttttgccttttccagaatgtcatatagttagaatcatacagtgtgtagccttttcagagtggcctttttcacttagcaatatgcatttaagtttcccccatgtctttccatgtcttgacagctcattgctttttagcactgaatcatattccatgtgcctggatgtgccacagtttatccattcacctactgaaggacaatttgatgcttccaagttttggcagttatgaagaaaactgcaataaacattagttttgggggtgctggttgtgtggacataagttttcaactctttggggaaaatgccaaggagtgtgactgctggatcctatggtaagagtatgcttagtttttaaagaaatgtcaaactgtcttccaaaggaaactgtaccacgtttcattcccaccaacaaatgagagcattgttgcttcacatcctcccaacattggtgtttcccgggctttggattgtgttcattgtactggtatatagttggatcctgttttaatttgcaactccataatgacatatgacattgagcatctattcaaacacttatttgccaacttgtatcttctttggtgaggtgtccgttcacgtcttttgcccattttttaaatcaggttgttcgttttcttattgagtttaagagttacttgtatattttaggtgatagtcctttgtaagatgtgtttttttcaaatttttctcccagtctgtggtttgttttctcactatttcgaattatattgacttgacttaaggacaaaaacaaccctattttaaagagtttgtaatgagaatgagtacagcaccttcttcctagatctagaagcagtgcacagctgtggtttcctaggctttcctggccattagatgtgggtttgtcaggagcccacactggcctgctaagctgtggccactagtcccacgtctcctgggctagctgtactcttttgaagccagtgcctagactaatgctttggggtagaaaggccgaaagtcctctcactagagactccacctgacaggcctctctctccagggaggaggtggtggtgcctcaaagaagaggaattcccactcttggtcattctagcaagggacaggaaatgagattagtgactgggtgaggcacagggacttatttggagcattctcagggaaggggaaggcaatcttactccctgacagtgagggaggtcatgggagaggcagccaggaagcccccttgttccggtccagggagctcacccctgacagaggcagctgagagttgatatgcctgggttgatgactcttgcacccatttaatttaaaggataaaggtaggctgcagtgctttggggccaggccacttggttttgtgctcctttcaggttttttccacggggactgttgtgcatctcacagcactccacgtgcctaagactgcaattgtgggtgcatgaggaagacagagcccctccaactcttcctgcccagccgttggtgagaacagagccagagctggagctgcaggagaccttggtgcagtgcccagtgcacactgccctacctgacaattctgttgggatctgggggacagccaggatccagaggggctggaggaacagaacaaggccctggacataggctggccacagagcaagcgcagccaaagaggaagtgctgtgcctggtttctttccgccctccctcctccttcttccctgttaactgttctgctgggagcctccggatcatggattagggattgtggtgggaccctgtcagactcaccatgttgaagcaggtcaccaaaggtcacacagttgcccaggatgagaatgcctgtgcccaggggtgcatcaggtagagtgaggagctgggattggatcccttggccaggctgctgcttctgcaattatccagctaccgtaggacaggaataaaagaagccacagaaatcaaagagctgaggtaagcaggaaggcagggcgagaagggagggcccaaaacagcctttccccaaaacagactttgctcatgatgatgggaactgtcgagtcttttgagggaccaaaagggggacacagtagcagagctgaagggccttgtcctccaggaatcaggaaggaaaggaaactaaggcagccagagtttatgggtcagtgctgggccccaaagcccaaccgtgcaaagggttttggctccacctccagcaaaatgatgtctgatgatgtgtcccaggatggggtctctgccagccctcctactcattgatgctcaccctgcacccagaaccactcaagaagcagcgggggtgggatgaacctccaggatgcctgcaggtggggcagattcaggggtgaaattcagaactgatataagaagtagatttaccttgaagctaatgatgcttccagcacaggcctctcatttgtaggaaccccttccaaagccccaggagtggctctagcaatcaatgtaagtaagaagataacctctcattctactgggacctcccctgtgtcccacacaatgcactctgcccccatcaggtggcactggagtggccccaggcatatgggggatccagagaggttcagctgagaatatgttatttaatctataatctggaaagatgctttgaaaagttgcaataaaacaaatgagaagttatggtcttccactttggacagaaatatgattttgtcatccttaaatttttaattaaggaacagagaaaaaaattagataatgattaatggggccaggcatggtggctctcacctttaatctaagcactttgggaggctgaggtgggaagatcacttgagctcagaatgttgaggctacagtgagctatgatcacaccactacactccagccagggtgacagagcaagaccctgtctcaaaaaaaaaaaaaaaaaaggaaaggaaaaaagaaagaaagaatttactgttaataaaattatgtttttaaatgttcatattttaccatgaagaagtagaaataaatgcctaataaaaataataatcaggctcttggaatatttagtaatctaatcaagagaagtgagtcctatgaagacattggggaaacttttaaatttattgatgaattaatcaaaactgacaaaaacaaagaagacactaaacatgaataccattaaaatgtgggtctagaagtgtatttgtcattcagagagcatttcaggtcaatcaccatacagaaaatttgacatgccctaaagtcatacagctcagatgggatagaaacatggttcaagtcttccctaattttttcaacaatttattataatttatatgacattatcaattcatcatgaagttgaaataaatttttctcaactaccgattttttcagaaaatgctgtttgaccagcactgccagaggaaagactgaaattacctttctattatgactctagaaaatcattgtcatatgaagagggaaacagcaagtacctagccaaaaatacaagaaggaaaatattacacagtatgtctggaagccagtaaataatatgtttttgcagagttttgtgatgtttacattatttatcagcttttaaaaaatgtgtagttcattttaattcttgtatcattttgaataagtattcacttttacacctagttttgtactcacaattttgttatcctttttctttacaaagtcccctacatttaatatggaatcgtagaaactagatggactgtgacagaggtggtgaccaggcatgggtgcagacacaaactctgcacggcctcagtcaccttagcccagaagccacctctaggccctgggacaaagagccaacctaaccacccgcaggcgtgcagccccactggcaggcactagctctccatcccccaacacctccccatggctcaggcgcccctgattcaaatggggaatggactggcatctggtcactagatatctcgtccccagattaacttttgagtcatttccaatcctgttcttttttaaagactgatggtgtgtactttcacactcctggaaagcaaataacatgagtttctggaggacaaactggcaatacatattcaaagtattcatactctttggcctggcaatcccccttacaggaatctatgaataggaatgatcagaaaaacagacaaatatgtaagcaaaataaggttcccacagcattgcatgacacaataccaacagtgttaacagaaagaaaatccttctgttatgtctctcccttgtcactaggtatccacagcctgaagaaatttaccaacatattaactaaaatgctctgagtggtacaattcggaggatggttgttttcttctttatgcattttgtgtgtgtgtgtaacacagatgagtttatcagaagaaaatgcacttttaaaatgaaacagtcgtagaaggaaatcaatcagacacctaaattaggaggctgacacaactgctcccaaaggaatgtcttagtacccctcagtatttctttaaaataaatggcttcagaaggctaaaaaatgggcctgcccacctcttttctcagggatccctagagcctttgctcagacactttgattcagtaatgctcataaatatggagcggccctttgcaagatcccttgcattttaatgtgggggtagtgctcacctcctccgtggatgggtgattgcaagcagtttcttggtcctcatttctgcaagagccagtgaggtgtgtggactgggatacttaagaaggagacacatggaaatgccatcttctgaccagggagtcccttggaccttggaagcaaccagagagcagagaaagaacagtagcccatgcagatgaacttacctccctcttctggccttgctgttgtcttctgtcaagtggggagatgactctgagtaatctctgagggctctccaattctgcacatgagcttcctacgagcagggaagttgactggcatggtggctcatgtgaaggccatggggaggacagggagttcacccgatccagcgcggatgcccttccttcatcttagcttgggcgggttagtatttctcatcctgaagtcaagctacctattctggtctcctggagtctcttctgacacaaggctaagttatgtaaatacacaaactaaacatgctttgcaggcataattttttaaacagagatgaggaatagagaaataaccaaaaaaattatgtacctttctgtgcctggtttatgtctgatttcacagaatccagcagactgtatacacatgggacaagcctgtgaacttggctatcacctctgagtttcagagggtgggtgacagacaaagacaggctggcgccacaacccagcacagcctgcagaggacacctacacatggggactcggtgtgggtcttggtggcacaggggagtctacattggccaggggagccctggggcccaatctcaggaagggatgtgccgcagggaaaatggagggccagaggagatcaaggtagagatttgtttctgtgtacggtgcagagagaggtccccaggtacaagccaagatgtcacaagtgcagggtgggtgaaaggcatctcagaggccacctgcagggaaggatccctactgacctgggcacctgaacacagtgtagcctgcaaacccgtcctccccagaggctctgcacccacacactctctgatctccctcatctggacttttataccaaagaggttttgatgcgcctatcagcttgccaaggccactgacagccacagaaatgcggtggagccaaccccatccaggggtcagtctttgatcctatttattatttagaccagtttgtgacttggtcaatacagatgctgcatagacaggaagcactgggtgcaggcttcgagctcattcccacagatttagtggtcagagaggaaagggcaacaccttggagaagcttgggaaattgaggcacaagagatgaagtccaggggattaactcgctcagcctcaactggcaaaatcaaatttggaagcagctagaaaaccacattgtgaataatgtagtctggcttggccccccacattgccttgtcgtgggcttccaaaccatccacttggaagtgccccatcaccagcctctaatgaaatgcaattggtgttcccgaccacgttcctaccttcaccagtcccagcagcccctcagtcccggccgcacacacttgggcacgccatgccagctgcaccaagccaatctgctgtgagatgccgggaaacggtttgcaaatattactttccaaatttatcacacttggcctggtaccgtggaaaaagttggttttgattttactgtggatgatcctgaggccccagtctgtgtcctactggggctggcttcgggtgctggggccgaagcctggtctcagagaggggccgggccttctcaagtggttctgctgccgagaaaggtgccagcccctccactgaccactggccacctgcagaagcccacctggctacactggccctttcctggcactttccaagccagcgaaggtgatctccctctggcaaacagaaatctgcgctgttgggagacagagcagtaggcatctatctccacatagctatcttgagcacctggtatgcaccattttgttagcatggaactctctccctatccctatctcagcagcttccttggagccagcagcaggcctgaggaggaggagaggggagtggccatccagctgtcaagagagaatccacaggccccataggagggacctggctgcccatcatagacactcagtctctcgctctgtggctgtcaagctcccaatatttctgtctctctcttcttttctgtctttatctgtatctttctctgtgtcttcttctctctctgtctctgtctccctctctgtttatccttctctatatctctgtctctgtctgtctctgtctctctctccctctttccctcctctccctctctttttctctctccttcctccccctttccttgcatttccctggggatgatggagttttcctccacgtcaccatgtggctagacaaatcagccctggcctttttgctcttgcatgagagtagaaggcctcccaaagcccctcaggttccatggtgtctgctccagccaggccccccaccaaaaccctctgaatcactggctctggggatggcaagagccctctttccctggtcctcacactcagtcccagactgttgagactaatgaccttgagtgtgtgtcacgtccctcatgtccccctctagggaaactggccagagtgggaaatcacagccagattttgggtcatgggcaaggggctgagggctcatgtctgtgaagagaggggcctcgaggggcccaggcagggaatggcagtgccgggagcactatggagagtggtggggtctgcaggaacctgccaccaactagattgggcagccgctctcctgccgcacgtctcctttcacatctgtggccagagtctccaacttttcaggagaaactgcagatctagattttcatatgaaaatgttaagacataattcaaagttttttgagaagcactctgcaagccaaataaaacacatcagcaggacggatctggccagcacagcacattcatgacctctgtttggtgtcccctaacacccacccctgggccccagccaccttcagggctggcaggggggcctctgcttccagggcccatgctcctccctcgccttcatcctggtcatggggctctgccttccccggagctgtcccagtgttcagatgaccctgaggcaggagcccacctgcagtacagcctccaggctggtcagccggtgtagacatctggtcattcttcatgtctgtcacctgcccagctggtcacaaagcagaggtccgagccccaggaaacccaggaccaccaggctgtggaggagaaagacttgctggtgtttcatggcccttgtttgctgttaccaaagctcatgtttaaacacaattactttctgctccactcaggcaacccagttggcacacccttccagggaccaagtcccatggcctttaaggaagccctagcatggggctgcccattccccagacatgaaaggcagctagtaagtttgctactcattagctgtgtggcctgggaaaatgacttagtttggctggcctcagtttcttcatctgtaaaatgggaacactatctcatgctagataaaaaaggacaaaattagacaattagataaattccctcccagcttcacccatgtgcagaaatccttgaagaaggagaaggcgaaggagaaggagaaggagaaggagaggagaaaggggaattaatatttgttgaacctattatgcatgaggcaccttgacaagggcttacaaatgtcatctcaactcaccctatgaatcaccctggcaggctatcaccccacttcacacagcccctatttccacttcacagatgaaatcctgagctccaggtaagttgagctatttgtccccggaagggcccaagatttgaaccaagattcaaatttggtcggtctcaacattaaacctagaaacccggccagctgcagtaacccccctgcagtgccttcagcctctggccctggaccgacactccctcccatggctccaacatgtgtgggcccaggctccagcgccctcctcaggggctgccctgcctctgctcttgagaggacctgcaggcctccatcacccagcccacgcttcctgtctgtgttgcaggggtgcccaacccagtgctggcctcttcctctcggtgttgcaggcggcctgccaatgccattccttgactcaaatggactctgtggacaaaagaacactcccccaactactgccttcttggcccaggcaactccttctcatccttcagaacccagttcagacatacctcgtattgggggctgtgcctggcaaccccagctccccaggctgggctgaatgcctccctaggccacaccagcacccaccttggccttgatctcattcactatcagtgagtccactctgcagtgaggggcaacgctgagctgaggtaaggcagctctcctggggccactgccttaacctgagggtcccagcagctgtccctggggcccctggtccttgcctctgatgccaccctgtgctgctgttacccactctcaagcaaaccacaccctggtgggaggccctggggctgcagaggctgtgaggacagagcctgaagcctctgctggggtcccaccctgagctctgaaagaacccccaaatggaagcccccaccctctgtgttgcactttgcttttcccatgtggccacaggtcccaggttggggactgggccaccttcccttcctcttgctttagtttcatgcccagctccgggtgtcttctcgtcggggactctgcatgcctttctcagggctgagcagagctgaggggtccaggagccctggttacccccaggtgacatcccgtggtattgttagcatggaggtgatgtagtgaagacgggttgtcagctaggatgggggcgagatgaccatctaagcaatgtcagagcagggcacgtactcaaaaatgtacaaacgtatcttccaatcttccagctgttgggagagcttgggccacccaagggcacagcgccccctgctggccatgacgatgatgcggcttagctcacagggctttcctctgcagcagctccccagaagccaggcaggggagtgctgggcggggtgggagagggataggggtgtgcatgcatgggccatttctcattctctaacatacaaacgtgctctgacacctctcttgaggaccccctgtgcccactggcaccaccaacaaatcaatcacatagccaatcaacaaattaacaagcacctgcagtgtgcacacactggcccagactcaccttacctggatgctccccacctccactctctgtgttcaatttgccatagtcctcctgccccacctcccatggctctcacccccacagaactgccccttgtgccttcctcctcaaccaggtcctcacgcccccaacaggacacatacccagggcccaaccacgtggcctatctctgcactctcctgcacccatccatcccgcacaccacccacactccagtactcttgccaagaatgctcgagcattctcaccaccagctccacaacctccagggcttccctgtccttgagaaagagcccagggaaaggcttgggtgatcagacccaacctgcagacgcagccctgcctgcctgactcccactcaatctgccctctaagcaaactgcagcagcacagcaccattcccagaaagcacccttcacagcagcctcccacacatcttcacagccccccacctgcacaggcatactcagcctcacagagtccccctacagccctgacccctcgttcctatggaagactcacgccgaggccctcgtccattcccattgcacatggacccaccaggccactcacctcttcatctgagcccccacacccagaagcacccatgccccaacaccctctgtggtatccaccctcccgcccacactcagggttctgtacagaaaggagggatgcagggagtgtggtgagcataggccccgacgcccagtttccccagagaagcctttcagagaaatcgctttcacatggcagctttggtcctccgggagggcagcggctgaggagggggcatgacggggcagccagcgagaccattgttcacgccttggctgctggagccaagcccctaccccagtgccccttatccattggaggaggccgcaggaaaacaaggtctggtacccgaggggcccagtgacccgtttgagcagctcccctcaagcagaagtttcccacatgaccttccagccgggccctgggctttcctgcctccacagcaaccgcagtcccctcgcttggcactgtgtcttggcccagggcacaggggaagggaggaaatggggaggtggggagaggatgcacaggcctagcccgggctcccagctggcaacagcccttcctgtaaggacttctgggccctctgggtcctctgaccacctctttccaccacccaaaactggtcatggcctgcatgggtttggggacccagtgagctacactcacatcactggatgcttcaaagcagctgtgtgactccaggcaagtgtcaggaccgtgggttcctcatgccctcctggctatcaagcttgaagggcccacgtggagattcgagggaaaatgcacactcaggcccaggagcagtgcctcacaccagtgagtggagttcccttttaacatattcttgggtattgcctccacctagggtctgtttgtccccaaatttaagcttcctgggttctgactatgttgggcccagtggtgtggtctctgcccagctggatgtcagcctcccctcggcctcaagggcccagtgctaccacccatgtttccttaccatgactctgagcagtgctggtccctctctgagtcccaggaatggtgcacttgtctgctaccggtatctccactccccaagaaccttcctcacccatcctactgggccacccaggacttctggccctctctggacttctgacaggctctgctataagcccaggctctccacctcctcacacccagcccctcacagggccaacgcaccttagtaggtgcttggccaagggtggcagggccatgttcaatacacagatttcctctatgagactttgcggggaggacagagagcttgccagcagcctggcctcttgtcccgtgccctaggccctttggagggagcccctgccctgaccctggggcctccctacctcttgcactattgcctggccttctatagccagcccctcacacctcccaagctgtggtcacgtggaggccctgccactcacgggccacacctgccatgtcctcggagccttaagatgcaggtgttgagagctcggtgttgcctgtaaaggtccccctggaggggtccctcccatcaggcctggaggctcgggtctgtatacatgcatctgcatggggcatgactggtttccagaacctcagagcccaatccacctgcccacatagcccataccagctgaccaatgacagtgaggcgaatcaccagtctcctcctcactctgaggcctccctgcgctgaccctgtcctcaacctttgatttctccttcttacagcccagctcccacattggactcagttctgtgatttgggatctggccttgacctccaacttgccccagattgtgccttggacttggcccagtccatgctcaggtgggccacccagagccactttgggcctctcagagcttatttcctttggtgtttggtgctgtggacagagaatagtctggcggagaggggagctgagacatgcaggatgctggtgcctggaatggctggcactgagcccatcgctgcctggaaccactggctgcctcctctctgtggcttgtctttgccatagtctgtgagcttggggcccacaccccatggagcaccatggccagacccaggcagcaaaggtgaggttggcccacagggaaacctgtggaaggctctggcccccaccccatcccaggctcaccctgcctcacagaaagcacaggagacccctggcactggggctggagcccaggacacctctcccaacttcctctggattatgaaatatatttcatgtgatatctcaattcttttcaaacaacatggagtgacatctgcagggcactttcctaatgctaaacaccttgggtcagcagtagaaatgcctccagtcattggggtggctcctaatcttcagatgtcaggcgccagggaacccaacttagggactaagatcctcacttgggaagggtcctgggggccatcagagggatggccatcactcacaggtgagcgagtgtgcacatctggattcatttccacgactcaggatcacatcaggcagcatcaggggccccaggagggatggaggtcacaggctcccaccctcgtcttagccctggaaacatgaaggcctccagtgccctcctccagtaaccccgtgagtgcctggcacaacagtgggcactcagtgaatgccggtaagtgcctgctgaccagagctcatatgggggagtgcacctctctggcaagctggatcccatcagtgtcggcccacatgtgcaccagcctcgtttcagctgggagaatcgcatcaggacaatgggaaagcttctccccgttcccctgccaggtgggcccaacgccagagccgcgatccagggcatcgctgctaagtttccaggctcccgtcaggcatcactcccacccagggggaccctgcactgtctcacttctttagagacagatcaaattggagagagttggctcgcatcaaagacaaggcctatgttgtttacacacatttttttgggaagagggaacaaattattttccttcttgtccatgggatgccaatgatgagttctggagaaccactcagagacacctgtcatgaattcccagggcagggtgagtggagatggagcaaacagcccacagcgcaggctcctgatttagaagggaaagtgcagcatggattctctaaagtccagcagcagcagcttgcaggagacactgcggcactcatggtgccctgaaagttgcacgggatggaggccacaggggacgatgcatgctgatgacatggcaggaagggcaggtcttgactcagcccaagggagcttctacccggggccgccgtcctgcacttctgagcatattcatcagggacaaggggagaggcaggctcatggccctagggtctgggtccccctgacacacccacacagtggtggagccttgaggacagcctggggcctgctgcaggtgtcccagggaagagggcatgggggatctgtgcctgcccacattggaatgcctcccccatgggaagcactgcaggctgggcaactatgggggaaatcaccaggagcctgcacagaggccccgcccaatgcactggagcatgaagcaaggagcgtctgcctgccctaagggcaccccatctggagagagtgactatggcactggccatcctgtcagccgggagcctcagggaacaaaggcagagagagcccccagaggagatggcagctcaggtgagcctcaagtgatcacctgcaaggaggggatttccacagaggggcgtgagtcgacggtgggatgcagcttcttttattcatttatttatttatttgtttggccaaaaagaagaaagaaaaagtcccactcatctttaccatccagatcacattgggcagaggttcaaggaacctgcgtgtggcaccctgggtggaagaacgctctggtcccgacagcagtctccctctgctgaggccttccctgactccccaacacccgctccccatttcccttcccttctctccctgctctgcagcctgatcatcacagacgtagtgtgggctccacccatttttggagaccgtcagcccttccatggcagcaccttgctttcaccgggctcccagtcttgagctctgccctgagtgcctcccatgcacagtgctcattcattttggttcattcagcaccttcccattttacaggtagagaaacataggcccagagaggctaagtgacttgtccaaagcaaccagctggcgcatggcagagcaaggactccatccaggcttcctgaatctgcatagttaacccctgggccatagaatctaaaatggtaacattatctaaggtctgggatttttgcagttgcaatgttcccagagccgaaaacagtgggtggcacataatgagatcttcataaatgtttgtgaaatgaatgtagacccagccctcctgacactgaatctgcaaccccccaacacacatgcattacagtgagagaaatttgtcatcttggatgcactgaaccacatggcatttcagctcagggtccccactgtctgtgtcggaagcctctggggcctgggaaagcagcacaccccataccctcgagtaagggtaaactaccaggaagcaatgtcgggtgcagagagcatggcctttggagcatctgctggagtcattttcctgaccctttgtccttctgcccacagttctctccccttctcagcacagcatggaggtcagaggccgccgtagaagcctcattgaagagaagacagtctgtactagaaactcaaggattagaactgaggttgaatcccactttcgcacttggaagctgtgtgatcttgagcaggtgttccaacctctctgagctccagatacctctggattgacaaggtcagggtttctccctgagaagtaattttctaacaccttgacatacacactctcctggcctgtgtcctggaccactgggccagtttcaacccctctgctggagacagcagcaaggtccctggacgatccctatgttcgaagtctgcttgccactgcctccaacagcctgtctgccattccccaggcctcagtgctattctgtggtgagcacagaagtgtccttgcccagtctcagtttttatttattttttattgtcagcctcagttcctaaaatcttaccacgttattagaggaaggtatatttttgacaactttatccacagttaccttaaatcaaggtgtcatatacacagtgccaagactgaagatgtttttcaacataaaaatccattttgatgatgcaaaggctgttgagaatcccttttgaaatttcatcagccagtactcagaagacttttggatttgactaacacagaggaatctcttcttggtaaaggacctcagatccagatgttgttccaatggaaaaaaaaaaaaaaaggaagaagaagaagaaaaagaactttttccaacattcctttataaggaagctggtgctggggatatgatgtccactttactgggacaaaccaaaatatcttgataagtagaaaattttttttagcaaataacctgctgttggaaattttttaaaaaataaacacagtcctataatctatgtcaagttcagtggtaaacatgaataaaaagaacttaaagaacttaaagagtcaagcgtcatctgggtaccagtaaactcaatgtaagtggtgattcagcaagtgagcttaggtttttaaaatgtactttcaatttttttgttaacaggaaatgagttaacttattaataaaatccaaataaaatgtaaaatgtagtaaggttggcacaaaataattcccatgcatgtgaagtctgcacctgtttatctggggggactataatcttgcagaaacttgaaacatcctgacatctttagtatcttgctctgcaaattgggaattacagcacctacctctcagagttgtttgttcacttcccctgccccacattccaggtgaacccccgacagtgggtgcttgcttccccaagccagaatttaggtccaggtgtgtgggtccttacggcacatcctaagtgacagcatgcaggttctgcctctgaagacagcccttccctccttccctttctccctccctttactccacacctccgcatgagcatctagtgggcacaggccaggggcaatgctctaggacttggtgatacaacagtgagcaaagtctctgtcctcacagcgcttaccatgtagaacaagaagaaagatgctcaaggaacacacagatgtctaaagtttaatgcaaataacataaaagccaagataactgagtcccaggctgttccacccttcccccttttaaaacaatcccctctgctttgcatgcaggcttctctccttctaccctagcccaggtgagggcattcagagagctccagggggcatcaaatggaaggggtggctcaaggtctcaccagcttgcagcctcagcggagagcagtcactgcccctgtccagagtccgagcaagctaagcaggcttgggtctgatcagcatccacccacaacgagggcatgagggagggcgagtgtgcagagggacaggccacacttcttccaatcccatgcgtggaggcaggcaggtgccctgctgtggctgtggggcaggactcaggggatggaccagctccaggaatgggtatggaacagattcacatggcccaggtcagattcatgtcacagcctggtgggcagcttgaccatgccagcaccagagcacaggccctgccatggaggctggaacctgtgggctgggctgccaggctttgggcttgcggagcaacacacctgccactcgggatggggttttgtctacggcgctgccttgtggacagtgagattggatgggggagcagcagagcagtcaggaatgatgaggacacggggtggtcctcaagcctggtccatctgctacggcaagcctagtttgggacttaaggtggctgcaccattgtagtggttattacgtgggttttcagaaccagtcttcggatcaaatcccactcctgctccttctcagctgggtgaccttcagcaaggcttcctcatctgtaacttggcaacagtgacaggtgccttgcaaagctgtcttaagaattgatgagatggtgaaatccaaacctcaagctaaagcaagtggggagaaaatggtcactgctgtgaacagacatatcagcagcagctgtggtgcatggcagagccgtcccccctgcagcatcattccacgaggcgtggctgggtaggccttgcggggccagcacattctcaccctgcccacctaccaaggcctgtttgtgttaatgtcacagctctgaagcattatcatcagaggccatgagatttcaaaggagcttcctttgcagagccacattgctctgtccataattagcacaagtttccatgagcatgacgatgaggccagaggggctgccctgcaggctggtttgttagtgtaagacattcctggggcatctgcgtagcctgggctatgcttttccagccctcgctccccctggcccctgccctcagcagcccccaggccctcattaagggattagcgatatgggccatgcaatcccttggccatctgcttgagaagtgctgggttctttgctctgtcccgcctgaaccttatcagtggtcctcgcgcaatgtttgtgttgcaaaaatcaaagcaggtcttgggcggaaattatagaccactggtgtcatgagctaattaaagactacggggtcatacacaagggagaggacacagatttctcccactgtctgtccttctgctaatgggacattgacaagcacagaccaggaagaaggctgagaaagccagcagcccgtgagagtatgataaaaggtgacagtgacaggtcttgcttcaccaagtacagattgggggatgctcctatcagggcccagcacccgtcacaaagggtgtggctgtggggcctggcggcaggctaggggcactcccccagcagccatccagagcctgagggaggggatctgtggggggacagtctcatgttaatggcaacacatttatgacccaggaggaagtttaggacagttctgaatgtctacatctccatcatcaaaacagattaaaattcaagaataatcttgaacaatggaaaatagacaggcagggaaaaaccaaaatgtaaccttgaatagcttctgctgttgttctctgtttaccaggaggctgtgagcttcttgaagggtttggctcccccacatgcgaggtcggggactggggtgatctaagtgagtgatgggagctcaaacccttgcacatgggatgagataacatccctaggtaccatttgaatgctctctccccctccacactcaccccagttcccagccccaggcagatggaccagactccactgctgaatctaaagtaaaggcggcaaatgtacgaccactagggtcaatatctggtgacttaggtcctgatgagagtgcttgccatgattcctgcacagagggtgatcctgtactagaggactggctccaaagcttccaccggccagggaaggggtcacaggagcacatcaccacccaagcaagtgtgatccctgccaggactagcagtgctgcagtagccttgcccactctcctgcggtcaggacccctcagtgatggcacacgtcatccagtttggaaagatcatccagcctcaagactgggcagcacctcccactcaatgcacccatgtggccagcccactctaggggtccgggacacgcttcggtctgggtgcgggggtattcgaggggggactgccatgtctgtcagggagtgtgggaagcagatgctgtaaggtgcaaaccagtaattttctggggacaccttctgagcccctcctccttccttcagccattctccatgcccccttttgctgagcataatcctcaatttctttattactcaatccagccttctctggcagaggagtatctactattttccaggggaggcttctcaaaccaaggcctgcaggcgaaatccagcctgctatctatttttatcaatgaagttttattggaatgcagccaggttgatctgtttatgcactgcctatggctgctttcaggctatgatggcagagttgagtggttgcatcagagaccctacggcctgaaagcctaaaatatttactctctgactctttatagagaaaatttactgtctcctattctaggaggtatagaaaaactattttagtttagcctcataatgtccctgggcaatagacgttgattttcatttgaaggaaagccaccaaggcttggcaaagttaaatagaacccagctgttagggaagggaggtgggcctcaaagccacatgtactaactctaaagactgtctttttggcatttgtcttgttgcatctttggcagaataagccgagggtgaaatgttgccttgatcctgttgctggagcagggctagagcttttacacctcccaaacctgcaggatgtctagtaacagcccccaacttttctccatggaagtcccggttaaaatccaaagacaaatgaccctctccatattatcctccaagatccaaaattactcattcaaacagctctttcctcttctccttaggtttgtgacataaaagtgtatccaccagtgagcctcttcctcctccctttgatccaggcattgtgtgtgcatttggagcctgagccaggtgggtaaggtgaccctggatgccgcacgaggtcctttttgggactggcaggtgcctcttcactgggcagtggagacgcaggatgagggagttgatttgtggctatagagaagctgtcagagacagaacctctggttactcagtgatggccctccgggagtcaggaacccaacagacctcatctttagtctgtaggatcccccagaaagcagacgcgctgggcattagagtgcctcttgttctctctattggctgtcaagcctctgaacgcccttagtgcttgaagaactggccccagcatggatgagtcctgcaggattcaggacctagctgctgctacagacacggagcagggcagtccagactcagccatctttctgctgctgcacccacctacttgttacctgaactctgccacccagcagtaagctctgccaggcctcacagtggggtggtggggtgtggcccacacctcgccaccacccacccccacctccaggttgacctcggtggtcaagcttgccttgataccttcctgttctccaagcctgtgctccaggattctctgtcaaccaccccatctgttcaataaattcattttctactaaagtcagcccacacctgtgcagaaacagggttggagcaatttaggtgccttgtccaaagtgataacagatgggaaaaggcagagctgggattcaagcgcatctcctctgaccctaacaagcacaggctgctctcgctagccacacccctctcaaggagcagcactgctctttctagaccctcagaaatgggccacctcccagatgccaggtgtgagtgtcctgacacctgcccctcactctcctccccagccagggcttctctgatgaattttcccaagtcagcctcttgaactacctgccttcctgggaaacaccttcaaatctgcagaggaccaagtgggctccagaaatgaaagtggagcatttcactgtgtgtggagcagtgagaaagggagagggtaggcttggagagtgcagttagcctgcattgggcatcctgacccgtcgggccccaggatgggagggcacaggagcctccagtcacaggaggtccttggggggacaatgcccaaggcctagttgaggaagggggcagagagccggctcccagcacacctgccaggccccacacctgggaccttggggtcccagagatttcttttcaatgcctaaagctttgctctccgagcctaaggacaagtgggcaggacagggcaggatggcatagacttgacctccttccccttgtcccaagttgcactctccagacatgggctggctgcacacatgggctggacactcagggggaaggtcagacttcccaatctgggaccctgattttgctgttcatggccaggtgtctgtcccttggctgtcagctgtgttcaccaggtgtgtgtcccctcagaaggtaagtggctcttccagtgggagtgttgggagaaggaaggagaagagcattctgcaggcatccgccctgctgcaactgcgtgtggctgagtgccccacactctgtgcccagggccacctgtctcccattatggctgaatgtgctaatagggagattccagaccttagttcccctggtagtaaaggtgaccctgcagctccatctcaggggtgtgcctccctgaggcagtctttcacccatgagagacttgcccaagatcaagacagcagaacactgaagctgagctgcccctccaacccagctctcgccgaccccaggaatcagggggctccccacttatttcctcctgtgttccagggctaaacattcggctttacacacacacttacctgcatttaacacctccagtcatcagccctgcttgaatcaagttgcctatgtgccagggaagtggtggaggtgaccgctcctgaccacagtcacctggccccactgggcaggagcatctcctggccgggagcagtgagggtgggaaagtcattttctcaagcattggatgggggctggaggggagcagacatgctctgtggtgggctttgggaacacagattccttgttctgggtgagcggtcatgaggcaatccccatttcctcatctataaaatggaaaaagaacctgagaatgctggcctcatgacctcattgtgcggcacacacagggaggatcagtcctgtggtgggtgctgccccaccagggcaggtgctccggcagtgacggggctcgtccacagctgtggcaaccccgatgcccccaccttatctggtagtcattgtcatctgcatcctccctgtcattaacctccccatgccccatgccctcccttttacatcctggccaggctgtctgtgccagctcaccagcagcccatgaaaagcctggacaatgattggagagaacagtaatgaatacaaatcattctctgggcaccacagagcctatcttgggtgatgcagcctctgggtgctaaccatccttggtccttcctggaatggctgtcaggccactgaggccgcaggcttgatgaagatggatgatggcctgtgcctgggtaatgctgtactaacacagagcccagcgtttaatcagagctctgctctctgccagagccgagtaattggaggcaggtgctaagcacaattgaaataaaatgtggagttaataaggacagtcgacaaggatgttacaagtcccctgtccaagttttcaacaggaattggaaggcaacttggagacctcagaaactgtgagttaatttccaacgtttctcttcaaaaacaagtacaatcaactttagggctttttttaaagcttatttattttcatatttgcaattcaaaaataagatggtcagaaaagcagcacatgtctaagatacttctgatgtactacaggggacaccagctccatggaggcctggacacccctcttcccaccttcatgctccgcactcagcaccagagtcctccaatctgcctctctggctgtcccttcctctcccagcccattcttaatggcctctgcatccctcatcttgtatcatccaggccattgctaccagcgcagtcttgctagaatgcacaactccctgcagaaagttctattccctcccaagtagagctaagccccaagtctccatggcctggcccgagctgggcccagccttatctcccactgctcctgttcccttttgctgctctagtcatggtgaaaatcctccacctgcctggagggtccctgccacctccactcttaatacactctctccctggcctgaaggatcttccgcccttcttcattgacattcccagatagtgccccaagagctgtcctgagccccgcgcctacttcctgtgcccacccatcccacggacagcactgtccatcacatcacaccctccacaggctgctgccagtgtcctgtctcccaacccgctagactctgcggtgcccaggtcagactgtgacacctgcaggactgcaccccgcatggcgcctgcaccccacgaggcatcagggatgcactggaccagcccaaggctgtccttgtatcatgtgctatcacttactagccagcacgttcccttaaagctgcatgggtgacattgacatggtctgtgcccaccctcttcatcctcaaaacagtcccagtttatgatttcatttcataaatgactgcccccccccaccaactaagaactggaaccgtaagaggcagatgaatgaaaggaaaacagattcaagcctgaaatcctccccacccagccagcaagctgtctcgagtgccctctcggctcagtcttcagtgaagtgacacctggtgaggatgggctgtggattgtccccctcaccagctaatacacctggattacacagtcacctggagaatgagcctcagggtgacccacctccatgtcaaggggaatcttgaggtccatgagacccagctcctatgtgaggggacccacctccgtgtcaaggggactcttgaggtccatgagacccagctcctatgtgaggggaccattccgcattatccccaaagttggagtgcatggagctaccatatgatccagcaaccctactgctgggtctatactcaaaagaaggaaaatcagtttatcaaagtgatatctgcacccccatgtttattgctgcagtattcacaacagccaacatgtggtcactgagcttgactgatgctcagtgtccatcaataactgaatggataaagaaatgagtgaacaatggaatattattcatccgtaaaaaagaatggaattctgtcattcatggccacatggatgagcctggaggacatcatgataagtgcaataagccaagcacagaaggacaaatatcgcatgtcctcactcatatgtggaagcttaaaaagtgggtctcatgaagatagagagtgggttggtggtcaccagggaccaggaaggttagggagagcaaaggataaagaggggttgattgatgggtacaaatatacagttagataaaagaaacaagacctcatgttcagtagatcaatagggtgacaatagttaaaaaaaaatctattgtacacttcaaagtaactagaagagaataattagaatgtttctagcataaagaaaagacaaatgtttaaggtgatgagaatcccaattaccttgatttaatctacacattatatgaatatttcaaattatcacacatacccctaaaatatgttcaactattatgtctcaataaaaaaaagttggagtccaacttcccccaagacaccccaggaaggggttttgtgatgagcaacagctcagagatcagaaagccccctctaagtcttgctgacatcctcctgtctctgtcggggagctacagagccactctggaagcaaatgctcccttccccacccctcaaatggagcagtcccttctggacatggttccaggcccatctttttcctgctcagccacagcacctcttcagaggacctcggtggggtctgcgcagcaccgaggaggcttcactccattcgggcagttctgcctctatggaagacagtggctcagagagtcagagaatgccctctggaatcttctgtggctctgactcacacccagccaaggccttccctctccccacccaagtctgaccatgtgaggagctttgcacacaatgtccctgattctcttgcatccttgtcctcaagccagagtggactcagcgaagtgcaatgatctgagggctgtgcttactcgaggcccacctgggcctgctgtctgctcctccctgctgctcccaggggagtccccccacttccccaacatccccagccccatctcccctggctccaggctccattgcaatctgaaagctctacaggcagctcaaactcaggtcccaaatggaactcattatggatccctccaaactcactcctcctccatcccctgctccaaagaatgacatcaccaccagccggtccccacgccagaaacctgggaatcatttgaggtgtctctggccctcatctccacccctagcaatcagtcagcattgcggctgcactggcctgaggtttcctgagcccagcccactcccttgcccactgtcattccctggctcaggctctcatcttttgccaaggctgttaccgcaccagcgccctcactgtctttctgattctaagctggctccctgccagtccttccctagcacaggtctcaagatgatctttataaaggtccaacatggtgtgtcattccagctctaaatccctcaagggctccccctacatttcaagaactcaaatgtcttgacacagcaagggagaaccacgtgacctggctcaggcctgctccccgacctgggagcctttctcttctgcacattcaacactgcttttttctcactttgacccttgtatttggactcccttgtcctccatcctcatccctgggcagtggctctcaaacctaagtgtgcatcgaaatcactgtaggggcttgttcaggcacatacaacactgggatcccctcagggtttctgataggtgagtttggggtggagcctgagaatctgcatttccaatgtcaagttcatatgatggtgatgctgctaacctgatggccacactttgagagacagcaccaccactaaaaccttcaataagcgctcgaaaggacccaaaaatgctagccgaatgaatgaatgaatgaatgaatgagtgggatacactctggccagccaaagttttgcagccactcgttaggactctgttgactggatctcacgtatgtgagtaatcttgggtggaatttctgaataagttaaaaaagacaaagctacatgttgcttttatcagggttgggggacccctgtgagtttctcttcgaggtcaggtcctgctgtgcgccctaagggtcagcatctttcccagacacggaggtgggaattggagggcctgggcctgggacctctgaatgcattcccgttacatcatttggatttctttatagactggagagtttacaacatcatcaaaacacatgtttttgtgattttccaacagccttgattcctgctaccatgtcctgttcccaggccaccactgagcacagcagacagatgccagcaagcatctgagctctcaaatgcacacagcatgtcccttctcgtgggcggggagctttggaaaatggaacactgggtgtgaaagacccagaaagggccctgtgaggctgcagagaaggggtgagggtgaggccagcctgcccagccagaccgtaactgtggagactccgtgagtttccagagtcgtgattagcatgaagaagcccctggggcccagcacagccatgatgaccagcacagtccgctgcatcagccaccgagggcctgggccctgtggaactcgccggggtagtgctcatgatcctgcttctcagtgtatctggactaggaaaccccatggtggtcaggacatccaggggagctgacggtctgtggccacatcactctccccttcaggcccaccaggctgaaagggcaaattccaaccctccttcagaaagggagttctccccgagtccttgagatccactgctctcttggggctaaactgtgttaacgaaaaattcagatgttgaagtctcaacccccagtacctctgaatgtgactgtatttgaagatagagtctttaaagacatgactgagttaaaatgaaatcattaggatgggccctaatccagtatgactggtgtctgtgtaagaagaggagacaaggacacagacactcagagggaggaccatgtgaggacatggcagaaggcggcgtctgcaaggcagggagagaggcctcaggagaacccagccctgccgacaccctgatcttggacttctagccctgtgggaactatatgggaaaccgtgggaaaacgactttctgtagttaagccccctagtctgtgattctttgtttctgaagctcaagccgactaagacagactctccagagccctggccaatgcgggcctctctgctgggtgaggaactaagcttagcgtgcctcatgaaggggttcaggggtgtccctgaggcctgtgcccattgcctgctctgtcttccccctggagagggcccttcagctctgtctgccctgggcatctcaatcccaccctggcttcccatccccacagggtgaactgcttgaaatgcagatgtgctcactgagaaagaggggcttgagccaggtttccaggcaatcctcacttgactgagccccagacggcagcactttgggccccatcccccaggcacggcctattcccctggggctgcacagaggctgtggggctgttacctggagctgaccttcggtgccatacagcccttttctctctggcctgagcattagccctctccccaaggcggtcctgcctcctacccccagaggggtgtgcttccctttaatttcctgcttcttccgtgaggatctggaagccaccttgcctctgggtgggacctgaactacacacctatagctggagatgctgccatggagcggagaaggaaggaggtgagctaagagaaggggtgggtgacaattctcttgacaccaaccggggacccacaattcaattcatttctaacacaactgcctggagctagcacagaccccacaagctagggactctgccctgcaagactgcacccacttcaagatgccagccacaaatctcaggggccccaggccacctgcacttctgcctggcagagtacacatttgggggctcccacagaccgcccccttgataatttgctagaacaactcacaaaactcagaaaagagctgtccctactattacagtttatgataaaggctacagatagatggccacatgaagaggtccttggggccagatctggggcagggcccatgccctccgggctccccttccagcacacccatgtgtttcagcatcagaaagctccctgagccgcccgttccaggggctttgttggggtttcattacacagacataatggatgcaatcgctggccatgtgacggaacgcaatcttcagcccctgtgcctccctggaggtcagaggtgggcagggccgaaagcatccgtcctgtaatcaagtgcttgggttctctgatgcccttccctgccttatcccactcaggtgtggagaactctggtgagggccctcctctgggatacagaccactggcttctctcagcattttcatgtggcagaaagtgggtaagaaatattctgggggtcccttttataaggcactaaacccattccagcgggctccaccttcatgacctaaatcacctcccaaaggccccaatcctaatcccattaccctggggattaagatttcggcatacgaatttggggggacataaacattccatccattttctctcccctctctcctgagtgaccccatagggttactgggtgagggtaccactctcggtctgcaggccccactcctcctcccactgccgaaggtgtctagacccaaaggaggagaccctgccccgagtcatgctgctcccatactgccaccaggctgctgggatgctgggtggggggctgcagaggcaggtgggggccccgagagtggtgttagggcaccctgcccgatcttctaagtgacaggagagtggggcaggggtggcgcccatgaagaaaggctgttttgctgtccacgtggagagtcatacaggggatcacagtgtacagccttgggaaagctctcactaaatagtccttgaatggaactgggggggcctgaagcaggtgggttaaggggagcctccatgtgtctgagacctaagagcaggactaacttggtgaccagccggctgggtaggcagagcaagggcttcaggcttctgtctgggctgtgagagaccttgtggatgcagggtaggggggcaggaaagagtgtggagtggcagcttcattgcagacgtgctgaagatgaggacacgggagcctgggcaggggtagccatcagacatgaggacacctatgtctgaaactcagaagtcagggcaagaggcacagatttggggctagccatgccatggctgctggggagggcatgctggggctgtgatggagaagtctcctgtacagccctgtccctgacctcccacccctggctctctccctctccccagggcacagcttcccaggaaagaaaagccaatcccatgaaacattggtggtgcaagcctggcagcatctgtaacgctctcactgtgctgttccttgttgggactaagacagccgcaccagcaggcttctccaaggactgggcgaggctgccctgtgaagcacatggcccacaggtccgtgcacccctctgccacgccctggctggggtgggcactggttatcccttccccattggcctcaggatccgggttgcctggcttgtggagacttgtgccatgctcttctgattagccaactgtggaggcttccagaagtgcagggcgacaagcctgtcccactgggccccatcaaaccccccaagtgcttcccttcccactccaatacctctgcatctgaagctccatctgaggctgggaggctcctggcttcttcctagggctctggcatgcctcaccttggcagaacaccctcaaaatgtgaacacaagtgtgttggggtactgacgcagtcgatggggagaacctggcaggtgtggcatcaggctggcagcttctgaccagccccatgacccctgggtggccaccattcccttctctgcaaagaaagaggccatgagtgaccccctcctctggtggggtgaagcttcgaggagatgggacccttgtctgcctggcgcccagcttccactggcaccagtgggcattcagtgcaggaatcccctctgccctccccctccccacccctcctatccaagttgacatcctcactccggtccctgtggggtactcagaaggaaggcccaaggctgggcagagggctcactggatagcccaggagcccaactccccactttctccacccaccaacaccttgtgggcgagcgccccccagagcccaagggcccagggcagcagcccgtcctggaaactgctgtgaggcctggttgtgcactcaggggcagtggccgggctcctggcttccggcagagtcccgctgggaactccaagaagggaatggtgagtgggaggccctgaccttcttcatgtgtgtggatggaggcagctggaccccatgaggagctcaggtcacaggggctgggccctgggagtgaggggtcagggaggccagagccagtatgtgctggttgcaggtccaatcctgtcaaatcctcaccttcttcacgggaggggaggcggtcactctcatgaaccctattttacagaagatgaaacaggctcgaggagggttagtaccctaggctcacacagctgggggcagagctgggattaaaccaggttggatggggccagggaccctgagtgaatgcaccacccacgctgccctgcagaaccatgtggagatgggcacagtgaccggaggtggccttgggggtcgatgacatttgcaggcaatagtgtagctctggctctctgtagtatttcctgcagggaggcagagggcagatggggtctctgcctcatgatcctgcagggaatctgccgtcagcgctggagcacctgtgggcacttgatcctatccagctgtagcagttgtcatccccaggaggggccagagtggcagacagacctccgtgcccctcttcaggaagctaagggtgactggagctcacaggcctccacccagcctggactcctctctcccaggcttctgggagtcatcccagaggaggtggggcccagagtccatcctgtccaaagaccacagacttggattcctgcaagggccaggaaggatgagtaaagagctgaggatggggcctggtggaggctctggccacccaacaagcaccagcctctaagaaaggcacagccactgactgtgcatctgtgggctaccaggctacagcctcatgtggacagggtcggatgagcccctgttcacacaggtctgggctagcaaagtcctacagccaccctgccgcaccacacaggggagggagcaaaggcccccgactgcagaagccccaccccatctggcttcagtcttctctctgtctctggtcctgaggccctcacacgttccctgctctgttcccaacacaccctcctccaccagactgcctctgagagcagggcacaggcagcaggctatgcaagtgagaggctgtggagttaggcctggctcgctccacctccctgctgtgtgaccctgggcaggtgcttcacctctctgagcttcagtgttgtcacttgacaggtggttgtgaagatccaaagcaataatgtgtgtcaagtgctttgcatgcagcagatgaagccttcctttcctccctgaaattaacaagtgcagtgctgggaagtgggagtcaggcataatattaagtccatgctcaaataggttgtgggtctgatggcagaggtttccagctggggctcatctgttagccatgaacttctgacccagaacagaggaggagacacaggttcagcagctgagcgtgtgagttggggagtcaggggatcctgcttcccagtacctgcctctggcagggtcctgattgctgcgcaggtgggcaacgccacctagtgggcatgcatagtgccatgactcagggtattgattgtcctcacacacgcgcacatacacatgcacagagctgtgaacacacacctcaggcccctacccacaccttcacccgcacacaaacgtcttctagcttcttaccccttggatcctatcttggagctgagcatcagcagccataaaaccatgcatccttcctctttccaaaagccaatttggggattgtgtgaggacagccaggtagtctgaaatggaaagggggtgaggtcacatttgctaagggcatgatagtgcatgccaggctccaagccatgagggaggtgtcaccgtagcactgaaaggttaagagcttgcccaagcccacccagagaacacaagactgcaagccccaggctgtgcagctgtacggcctggttcctacaagctccacagactattccatcataaaaaagggtttttctggatcctttaacttccttcttgaactagattttatttgaaatggaatcaacttgactcataattctatttagggtcccgagatgattttctaagtgacagcagaacctgcattctcagcagccattgtctaacctatgctgtcctcctcctccttctcctcccagcaacggtgtgtgtgtgtgactgtgtggtttgtgtgtgcacaaatgtgtgtgtgtggttgtgtgtgtatatgtggtgtgtgtggtgatgtatggtgtgattgtgtgtggtgatgtatggtgtgatgtgtgtgtgtggtgtgtagtgtgtgtggtgtgtgtgatgtgtgtggtatagtgtgtggtatagtgtgtgtggtgtgtgtgtgtggagtgtggagtacttgtggaatgaatgtgtggtgtgtgtttgtggtatatgtgcggtgtgtgtggtgtggtgtgcatgtgtggtgtgtgtaatatgtggtgtttgtggtgtggagtgtgtgtggtgtgtggagtgtgtggagtgtgaagtgtgcatggtgtgtatggcatgatgtgtatgtgtgcatggtgtgtatggcatggtgtgtacatgtacatggtatgtgtgatgtgtggtgagatgtgtgtgttatatgtggtgtgccgtgcatgtgtggtgtgtgtaatgtgtggtgtgtggtgtgtaatgtgtggtgtgtgtggtatgagtgtgtttgtggtgagtggggttcgcggcaccaacaggcgctcagagtgtggttaaacccctgctctgcaccagatgtcctgggtgtgttcctgtggaacccgtgcctggactgcaggctgctcctggtgccttgtttctaatgaacagaacaaggcagaagtcatcggccaccacttccaagattagattacaaaaaaaaaaacctcgggttctgccctgggtgcctcctgcctgctcccttgcctgtttcagggaaagccggtggccaggctgtggcctggagaggaccacgcagcagagaactgagcctggcctcagccaacagtcagcaagtgatctgccagcaactgcctgagtgtgcttggaagcagagcctccgagtgaagagagcgtgtgggacgccctgaggcagaagacccagcgaagccaccccaatccctgccccataggaaccgtgcgaggataactgttgttggaagccaccaaagggagggcagtttgtcacaccgccacagagaactaactcaatggaccttttctgtccccttctgagccccacactccctgctataaagtagggattgggtcacaggtcatgcttgcttaacacggtacttgggaccaaagagagactcaacaaaagttccctttttcctgtccacactcagaggcaggcttggatcctgctcacccagcctcatgtgatgaaaaactccaagtcaggctccgtcccacagctggggtctgacaaacagcacccccttgccagccacggcagctggagaaggaggtcgccggcagctggagaaggaggtcgccagcagcagggctggagagcagatctgatggcatcagctcgggcttgctccgtccatgccgggctggagtgtggccatcactcccagccacagaagctcgttgatctctgacctccctggtgggaacaggcccttctccaggacaggccagggcacctgcactcagacagtctgcgggtgctccctaggccagggctgacagccccgatggaaagctgatgccctgcctttggcacagtgagtccaggaagaggcacctagccaccacccacatctatgggagacacacctagccagctcctgattccctagcctcactccaggcacctcctaacactccttccatcttcctaaggggcaagaggcagcctcccaccccaacaacgctggctgctgcccaggctagcccagtgagctccatctgcagtcccatggcgtggatcccaggaccctgactcctgggagtgggccctgggaggagtttcagagctgctgtctcccaggggaggctggccaagcccctcttctcctgctctccctcccgtcaggcacagcagccccctgctctgggaaagtacaaagacctcacctctgagacccctccaccttcgaagctctaaaaccaggattctcgcatgagccaccctaacagcaaccctgataagatgttcttcctactttctagatgacgaaagtcagactctaaggctcaagagtttttggcaaggtcacacagcaagggtggcagtcttaaacgtggccccagaatcccttgactttccttccactgaggggtggggtttatgccctgtctttgagcctaggctctgtggctgcttggccaaagaaacactgtggacatgatgctgggccagtttctgggctcaggctgtaagaaacctgggttctcttggaacccaatcatccttctccgagggtgcccaagtggcccaaggagaagaacctggcttggccccctgctgacagccatgcggtgtgccatcttgaaagcggaccctccaccccaccttgagttgcccaggtgatgccacggggaaccatccccatgaagcccgacccacactacaatgtcatgagctaaataaatgtgtttttctaaaccgctaggtttcagggtaattttaagtaactgatacagcaagaagtgatgaacacagttcagatgatctccaagtccacggtctttttgattcccaaccatggctgcctccctgattctcactgtattagtctgaagagcttattaggggaggaacagaggccttgaaaagacccccaaactgaaatccccttccccccagggacagccccctccaggaaattcctttcagggctgtcctcgctgcatttcatctctagccctgcggcaggggtagaattctcagatgacccctaatgacttttgtcttttttataattttcctcgagtgagtaaatgtgagtatgaaaatctatcactctcaagattatgttacttatttcgtgcaaagactttgcaaatgttatgaaggttactagtcagtcagttggccttaaggagatattttctgcttgggtctaacctaatcacaggagacctttaagagtagaacattttttttctggtggtgggagatgaggtagtcagagagatttgatgcttaaaggggcttgtacactagggaggttctcctctcctgagacggaggggccatggggccaggccctgagaggagcctctaggagctggggtggtccttagatatcagccagcaagaaagtgaggacctcagtccaacaaccacaaggacatgaattctgcccacaatctgaatgagcttggaaacaatttttcccccaaattgtccagaaaagaatgcagtcctaccaacaactcaatttcacttgtgggattctgggtggacaacccagttgagcccaccgggacctctgacttacagaaccatgagataaatgagttaagttgctaactttgtaatttgttacataggaataacaaaattaatacgatcccgttctttttgtttccagactcttccttctccaaaagtgtccttcctttttttcattgcagaccttgtaaatggggtgacatgtagatctttaagccgtggctggagcgtgggtctacagccttggccaaggcccctgggccagcccttgggagtagtgtttccacccatagctgagggctgagtgtgggcccacagtggaatgcctgagcgtgcactagctgggcctccatggcctggcagagccttcctgggctggaccggctgagtttctgagtccaggggatgccgccaatgatcaggctcccagacttcctgttagggtgactaagcccagccttaattaggtggactctgatgatctgttctctctcaatttcctcatttctaggacaataatggttctctgttcataccagaatttcctcctaaagaaccagccccagactcttcacaccatttattcagtcttctccctgtgtaaccccagcctttcccatctctttccttttctgaaacccagccacactcttacagcgcacgcttacactgctgtacaggtggggctgagtgtgcctgacgccccttcacctcctctcctcaccccagttcttggccacactctagaacgcagataacacaggagttcccatgtccatctttgaaatgagaagcctgaggcccagagccctcagcacggaatggaaggctttgaatgcaaacctagagggttcctagttactttatgtctctgcagttactttccaggtttttaaggacagtgatctttgtcttctatcaccactgaagttatccccttcagaaagaagcactggcctagatatgcaacagattgttaaaaaaaaaaactgtctgataattgcaaggttgtgtatttacttatcatatcaagaagaaacgtgtggttttgactctccatttccttactaatcatcttatctgtgctacagcaccaccacattatctgtgtccactccacggtggtatgttcaccacatcactggaaaataatgccactcactgacagcacacccccaccaagctccatcttctcagaggatgagggcccagactctcaacaccctcttctctctgccccctgccattgtctccagaatgggagacgacgccaacctccatgctctgactctgctgaaaccctgctcccaggccctctctggtggcctctgactccactcttctcagccacacacagaaacatactcatcttgggtttcttcatccctcaagaatcaaaccagctcccaggccaagccctctgacattgccgtcattggccacaatctgcctccccttccacctctccccaggcctggttcacctgctttttatttccataaagaacaccccattcttttatcctgcaagtccctcctgaaaccattttcagctctatcctcacacacagaccaaacccctgcagagtccccctttctatggctgccttgtcaggaaccaaccatggataaggcaccacctgccttcctctatctcctggccagtgcgacatggaggggaagctgtgcaactgtgtgccttggctccttgacaagccaggcaacctccatgagccccccaggctgatgcacagcccagctcttcatcccttgctagcatccaacagctgttcccaatctccttctttttccccagtccacaaacccacccccacgtcccaaactcgtaccagatgaattcactttataatttattgagaatttcatcctataatgacattctcaccttctctccccttctcctgagaatgtctcttatcttaccccagtgtgtctttttctgtgaaatacccttcctctttttgaaacaaacatttccctctggactctaaatctctcagcttcctgattccttcctgacctccttccatttttctgtcttctaacttcttaaatttttattttttagctgtattgagatagaattgatatacagaaaattgcacacatttcatgtatacctcttcatgagtttggacatatgcacacaccatcaccacaactaaggaactaaacatattcatcacctccaaaaatttgtgtacttttttgtaagtcactttttttgtaagaacacttaacatgaactctgtcctcttaatgtattttaaaatgcacaatgctgtattgttaaccataggtactatgctgtacagcagatctccagaacttactcatcttgcataacagaaactttataccttgaaaaacaattccccatttcttccccaccgccagcccctagcagctgccattctactgtttctatgagtttgactatcttagatgccttatgtaagtgacatcatgcagtatttgtccttctgtgactggcttattttacttagtatgtcttctaggcttatcctttcttttgcaaatggcagggttttcttctttttaaaggctgaacaatattccattgtgtatatgcatggcagtttcttcatgcatccattgatggacacaggttgatttcatatcttggctattgtgaatagtgctgcaataaatgtgggagtgcagatatctctttgatataccaatttcttttcttttgggtagatacccaactgtggcatgtctgggtcatacagtactatttttagttttttgaggaactgccatgatgttttccataatgactgtagtaacttacattcccaccaacagtgtaagaatgttcccctttcttcacatctatgcaagcatgctattttttgtcttcttgataacagctattttaactgtggctagatgatattgcattattttgatttgcatttctctgatgattagtgacgtttagcatttttttcatatatctgttggccatttgtatgtcttcttttgagaaatgtctattcagatatttttctcattggattattattattattatcattattattattagccattgagtggtttgagttccttacctattctggttattaatctcttatcagatggatattttgcaaatattttctctcattctgtaggttggttgtctctttgctttgttaattgtttcctttgctgtgtataatttttttagcttgatgtgatcccatttgtccatttttgcttaggtttcgccacttttaaggtattacctaggaacaatctttgcccataccaatgtcctgaagcattttgaactgggacacttttgaaagtgaaggaggtgtcattaataattacgcaggtcaacaggcatcaagtggactgtcctgatcatcctagccccaggcttgccataaggatatttgggatttgtttgaatcgggtgtggtaagacatgcagggattaaaatgactgtcatgaaggaagaggcctccgcacaggtccctagaaacaggaggcgtggtgccccagtcagaggccaacagggaagcactgggtttagtccggggtcaaggagagtgggaatctatgggcaagagcctttattgaggtttctgtgaaaagcaacaggcaaggcaaggtaaacaggcctaagatgagctaatttgaataataggagagggtctggggcacaggggctgcccaggtgtctggcacctggccctgggtgattagggcaggtgagtagtgatcatgagtgagagccccctggagggggtcactcagggtgtaagctctggactggttggtctgtgtcagaaaagcatgggcttgggtgacttattcactgtccttaggaattggcaacgctgggaggggcagcaaggccccaaactgtcagagcagcagaatacagaaaataaaagggatggctaatatagggactatcagagtcacccaacaggctttttcataaagtccatgctctcttcccacccccgagagttaagtccatgctcccttcccaccccctcccccaggtaagaatgactgcctgagtgagccagtgctacccatgtacacgtgcacacaccaggtgcgtgtggaaagggagagattgggagccagggctttgcctgctgcctccccctgcacccccaacttatactcacttgacacatctaatgcctcaaatctaagtttgtgtccttcgcctgctggactggatcccaccgcctgcctggtgccacagtgactcctattttctcgttcacctggaatgccttccccctccacatgtcgaagacccagctgtctcaaggccctgctacaaggctgtttcctggaaattcagcttaggcctctctccctgcctgagtcccagccgcagtttacactccctcccagcgccccagcctgccttccaccatgtccacctctcctatcagtgtgcgcttcctaagcagctcctctggggcagagagaggtgtagacactcttagaatgaacaatgctgcccacctccagcgtaaggcatggtgccgatgtgccagtgccttactccctggcagcatagtaaatgggagcagaagcctctgggaaacacgctgtcttagcctagtgtttcccatagtaggttacagggcatgtgctcttcctggggtttgctgaactgcaaaacttctcacagcttagatactgaggagcctgtgatgaagagattctccttagggcattgaaaacctttttttttcttttctttttttttttttgtaatttatgtacttgccctcttttttctgagactcatgggactggtggtcttgaaaagcataaatgtctaagaaaggtgctttcaggagactgtagggccccgcttaagcaagtggctcctcccgcagactgcaggtcatgttggctggactatcacctattttactgatgatcctaaacctctgattaaggtgacctttgcctggtgaagctaatatgtcccatctgctccttctctttggtcccccaagggacataaactaagccagcccatccccttgtccttggctccagtcaagctaatcagctttcagtcccctgaattcaccacgcttcttctcacctctgtgcctttctcacactgcctgcttcaaccgcaaatctctctctctcatatacatcacctaatatatatatgaccatatatacagacataaatataataaacacatatgtacatatgtatgaagttggacatgcatgtgtatatgctaggctagaaagatggtagatacataatagatgatatagatgatagatggtggatagatagtagatagatcaatagatagataatagagagataataggtagattatagatgatagatatagatgatagattagatagatgatagatagatagatagatagatagatagatagatagatagatgataggagagattgcttattaggctgccccttttacttaggacatatctagaaatattcactaaatgaagaaaggtaaattaaactagaaagtaagtgaatggatggatggatgggtggaaggatgcatggatggaagtagaatttgtattacacatattggagaattttaatctgataataaacagaaggtgtggcttgacaaggactccttccttgccagactttagtcagtctgctttgagccctcttcttgactaggccgtggcctgttgaactcagtttacggagacttccccaacccttgatgtctaattaagttcctcttagtgattttccacccactgacacctgactatacccctgcaccttggctataaatccttagctgtctttgctgtatgcagagttgaactcagttctatacttgtctctctcccctactgcaaaaacctttcttgccatttttaacaactgtccagtgcaatttcttcttgacaggctgtgaatgtgtacatgtatagacccattctgggtttcacttggctgctttggacaaatcttaggcattgtaggttgtcaccagcacatttgtaacatgggtgtactgcctactgggctctctgaggaaacccttccagaaagggtcagaaggcaattcttaaatgtaatgggtgctttagaagtcagcctagatttgaagtggtgtatcagcactgaagaaacactgtgttctccttcagcacgctggaagaacagcaacgtgttactcattcaagtttgtcctcttggcccttgggctcccagaataaaagatggcttctctagagtcagaagggcaagagaactgtggggaaggaagtgaacgctggctcaactgctagtgcctgcctggttcatgctaagcactctgtccgtgtggcctcacgcaatcttgccagcaacctgcttgggcagatatcatcactgtttcacacctgggtgctcatccatgtggcttctcttcacctggcctcttggcattagtctagccctagcttctttatagcatgatggtggcttccccagggtagcagaagctgctggtcttcttaagggccagaatcaggactggcttaaaaatcatcactttgtctacattttattggtcagggagtgtcaaagctttgcccccaattcaaggggcaggaaaagactccacttcttgaaagtagagcagtgttcctgaatagggaggggaggaattgatggagaccatctactgcctgccctgacccgggacggggacctggtagggattctgctcactgaggccaggaagcaggtattggacacctgtggcatcatggaccggaagtgcattatacctacctgggccaggtacaggtgctgacggactcagaaacagatgtagggattagtggaatccaggactaacctacactcgcttacagtaagcctgcatgtcacaaatccgaggtggccctgtagagggagccacggcctttttctgctagtttgggctagccctgggccacagcagccagcccatcggtccagggggagtctagaatgtgcagcgaggccctccgggtgcttgctggccaagctgcctgggctgtgtggctgtatcacagtcctgaccgcaccctcccagccttcccagaacagagcttccaaggcgaaaacacctcctggctgttctccttccccaaatggctatgttttatgatgtgctaagtttgggggggaaaaaagaaaattcctccagctgtggtgtaatcccatctgaaggcattccagggatttgatttataatctctgggcatgagccgcatgctgggctctgtgagaggggcgcctgtccggggcgctgcagggccagggccgttgaggccctccgggtggagctgcctcctttgtgggttcccagtttccagcatgctggagctgtctccaagcccaagttgtgcatggaacaggcatgcagctaatattcagaatcaggatgagctcactctgctaccaacttgcataatatttatttattcactcatttaacaaagtttctggggactagaaaataccttaggtactgataatacaaaatgaatatggcaaagattgaaatacgtttgaaccaaggttaatatcagaggtaggtattgaaagtttcaacccaacaatcagcttgtaaaacagcggtctgttttctttccctttttttttttttttttttcaagaggggttgaattatttttgtgagggtgctggtaagaggaagctctacatgaattattggagaataacagttctgaaaggagatgtggctgttctaagcccagcctggtgctggtctccccagtgtctttctctcgagaaagaaacaaatgaaagttgatctcagcaaccaggacccatctgggtacccacacctttccttcccagcagccctgcagggttgaggcttgttctcacagcctggaacacaagaatagcatgtgttccagatggagcagaatgattctggcctaggaaagacattataccgaatgggtttcagattcttattggtatctgggaaaggacagacagccacttctacttaaagaaatgcccacaatcccacttcccatcatgggcagaacatgcacatgaactgcaccccacagaggaccctgtgtacagggtggtgcaaggccaacataaaatcaagtcaggccaaagaggaaaagtgtctttgcccaaccgcggtattgtgaagggagccttgcacagctgagtcactattttgattcaaagactgtctatttctttttgtcctccctttgtccctttgtttccttggttgaaattgtgctcggtgagtgaactgtccctggcctgctactagggtcagcagggcctgagtctcatgtcacctttgatcatcattggcagcttctccagctccctgagacagtcagggcagggggctttaaaatctttgagcaactgtatacatagagggctgaatcctagacacagctgacatatactatgacttatttcatttttaaccagtaagtcttgggtctatctgttattagcagaagcttctaagcaaaacaagaattccaaaattcaggaggattagcttgacagatttcccaaacaccttggacagcaacatgagttaaaatgtgacccccatcatcactatgcattcatcatgactagcttgcctctctcaaaaaatggcctgggagagaatgggccagaggtgctgttctatctgtcaaatgtgatctatgtaatcatcctagttggcactgcagaatgaaaactcaaatgtgtctcttctcattccatgaaaaaggaaagctcctgagggttctctgtgacaatacttatgctacttattcttggtcctgtggtggcactcagtttctctaaaagcgaaaggacattatggtggcctacttcacccaaatgctaggagatcacacagtgaaagtcaggtatttgcattcattcactccttagaaactatgtactgctggaaactgaggagcagagacatcccctgcccctacaggacagtgttggtgaggatggatttaaagacaacagagcagaatccgagttgccccctgccctgattcaacaccagctgtcaacatcagctggcagagaggaggaaaagtggcttccaaagacgaaaagaacaatcaaggaagccattcgaagatagtagaaaagaaagcaacagtcagctcaagaatacgcagtagatgaaaactacagcttccacacaggaagagctaaaggagagaggccctcaaaaaaaggttacaagaagagtttaaaagtgagttgaccattttaatgatattgattcttccaatcatgagcatggaatgttcttccatttgtttgcatcatctgtgatttctttcagcgtgtaattaattctccatgtagagatctttcacctccttggttagatgtattgctagatatttttgtggctgttgtcaataggattgtattcttgatttgactctcagattgaacattattggtgtatagaaatgctactgatttttgtaccttgattttgtctgttgaaactttacagaagttgtttaccatttctagaagccttctagtggggtctttaggggttttttggtttagaattatattatctcttatttctttttcttgcatgattgctctggctaggacttccaggactatgttgaagagaagttaatgggtatgggcatgaacagacacttcccaaaacaagacatacatgcaaccaaaaaacatatgagaaaatgctccacatcactaatcactagagaaatgcagccacaatgagataccatctcacaccaatcagaatggctattattaaaaagtcaaaaaataacatgctgatgaggctgtggagaaaagggcatgctcatacattattggcgggagtgtaattagttcagccactgtggaaagcagtttggatatttctcaaagaacttaatacagagctaccatttaacccagcaatcccattactgggtatatatccaaagaaaaataaattattctaccaaaaagacacatgcacttgtatgtgcatctcagcacaatttacaatagtgaagacatggaatcaacctgggttcccatcagtggtggactggataaagaaaatgtggtacatatacaccagggaatactacacagccatataaagagaacgaaatcatgtcctttgcagcaacatggatgcagctggatgccattatcttaaatgaattaatgcaggaacaaaataaaacaaatactgtatgctctcacttacaagtgggagctaaatattgggtactcatggacataaagatggaaacaataaacactgggaactcctacagtggggagagagggagggaggcaagagttcaaaaattacctattgagtactatgctgattacctgggtggtgggatcagtcatatgccaaacctcagcatcacgtaatatacccatgtaacaaacctgcacatgtatcccctgaatctaaaataaaagttgaaattttttaaaaaagagagaaatgacttagcatgtcaatgaaagactttatattaatgacaaactctagtggaatatatgtccattttcttcacttttacgtaataaaatttaaaactttcaaaaataaaagataaatgagtcgacaacggtgcttggggaaaacaattcttgtttgttaatactctccaacccagctcttttgccttccagctggctagtcattaaacagttaaatgaaacaataaagtgtgctcactccctctgtgtatgagaattatgtttccaacacaatagattcctccataacaacactgaatgttaagagaaagtaagtgaaacaatgtctacaagccctccaagtgagaaaaaaatgacacatgaattttatacagagccaaaatgtcacatacatataaagaacttcaattaattgaaagaatgccagaaatcaaggacagtagaacttgtgagcccatcttggaaaaccttttggaggatgaactgtcatcagccaagttatgcataatgaaatttctatatactagctaaagagacaaaacaaatttgtcattacattatgctctttggatatttaattcactcctccttatcctaatattcctaatttcataaccagaagctgaagtgatgtcactttatccatgtaagttcttctccaggctcttcaggtgctaatatgcttaaatctcttcaaatattttatagtgtttgtttttgtcgacaattggaatatgaccatgttcctgcctgtcctacttattatacgggtgtgtcaaaagggcaagtgtgtcacagggcaagtggcatagcaccaggagatacacacctgcacgaatgtccatgtatctgggtgtgggcaaccagagtgcacatgagaatgagaagggctacttctgtgactttcctgaaccaatagtcccaatagagccaggctagagcaaaaccacagcctccaaacccagaggtgcctcccccagcactgatttaggagcccccagcccatctccaagtgttgtgcggcactctgaagttcctcctcacccccttgaggcagctgctccgtgggtctctggactcctcaaactctgattcccctggcagaacaccctcctggctgcaggtgtggctcctgtcccagcctcaaagcaacaggttcctgtgctcccatcattacagcgaagagctgagggctcttttcttttaattgaatcccctgaggaacgccccccaacaacaggatatccccaggctatctgttcttatcatactcataatgtttggctttgtcatgccattcacccagcctcaacttaacacactttccctgaaggtctaaatccagacaaaaatatgagcaacccttctcaacacttggcctccctaacataattacaaaccccttattcatagtctttggctctgtccagagcttaggcagtctcttcatgcctggatgattctcccacacagtatgtgacctgagaagtcaggaatgatcattgtgctctaatgtcatagcaagtggcatgccacctagctctgggggtggcagtcggtgccagaggccctgtcattgtcttccctagaggccataagaactctcatggaaataagttgaccccacaggtatgccagcccagacatcctggtgaggccccagcatgccccagttctcaacggcaagcagctcgggaagtaccgaaaggacccaggcaccatttagttttgtaaggccattcagtaaagctcaggctcttggaaagccagcctctttgattcagtcctttgttgctactcgctttaatgtttacctcattttctgcttcatgcagccagaattactggtaaataagcccttcagcaaccgtagagtcttgtgctctgctggagatgtatatgcttggagaatgaaatactgtgaacatacatatttcagtttggactgtgaaatgccttctatacatctgatttgtaagagagatggttctgatcgctaacatctcagtggtgatcctgaggagaaaggcttgacagaattttaaaggtgctctatggagtataattaaccaaatccaccccccctccgtatctgaaaaagaattctggcagtgttaccagtgaggaagataggttcttttgcataaagggacgtttagttgtttccctggggttattatttccaagcctggctgtgtgatggactcagtttccccagttgcattccaatccattcttcagaccagtccaaaacagtacttaacttataggagagaaacagtgttttaccataaaatgtgcttctgttgtaagtttgctgtagctatgccctagcagattaaggtaattcccttctattccaagtttactaaaattttttatttttaaaatatagaatggatatcaaatttgattcgaattttttttctgcatctattgaggaatggctcttgggaacaatattttctgagctcttgcatgttgatttcaattttcaccctgtgcatcaaggtcagtttttctagacataacatattggctcataaaaatctttccttggacatcttattattccatcttcttttgtattaaagcattactcttaaaaatctgataatcatctaattttcttttcctcatattcttttgcgtaaatcctcccccctccccattttctttcttcaaactgcagcaattttacttaaaatttattaaaccttggtattggtcatactcatttgatggtttcaggtatgtactatgatacttcaacatataattttaaaaacaattatttcaggaaaattttctttaattattactctaaatatttcttgaattagtgaatttgttctgaacccttgctttggtttttcttctttaaactttctgttatctatctactagtcttctttacctatcattgatccttcttatgctcttaaatcctgttttctttctccattttgttttgaaattattcctcttaagctttctatttattgtaaagcatcagttatcaatttttttgtgttccttctagtttatagattttatttctaatttttgtttctaactctttcttgattttcatactgctttaaatttttctagttctgatttttgttattccatcctgttttatgcaattctcctattgtctttaagctcattttgaaatagtaggatatcgttttctgtgacttcccgagctgcttgccattgagaactgtgttttgagtgtatctttctggtgtaccttcattgtttgtaagggatgctattcagctcctcagtcttttttttttcttatggtaacttgtacgggatttgatcataatattttctagtgcttgtttccatgtgaatttggatttcctgaactaaacttgacttggacagacagctcttataagttcactgagcttgctttctgaggttttctggctctattctcctcaatcacttttataggatcttctcttttctttatcccattctctccattctctcctcaactttgattctaaggtttctcctcagtgtgactctgttctggaaaggagccctggctggtcaccttttagagcagataagagctacactgctctaaccccttcaggccctaccatgtactcctcgcacttttccactttgaaggtgaaattaaagggatacaaagaaatggaagaacattccatgctcatgggtaggaagaatcaatatcgtgaaaatggccatactgcccaaggtaatttatagattcaatgccatccccatcaagctaccaatgactttcttcacagaattggaaaaaactactttaaagttcatatggaaccaaaaaagagcccgcatcgccaagtcaatcctaagccaaaagaacaaagctggaggcatcacgctacctgacttcaaactatgctacaaggctacagtaaccaaaacagcatggtactggtaccaaaacagagatatagatcaatggaacagaacagagccctcagaaataacgccacatatctacaactatctgatctttgacaaacctgagaaaaacaagcaatggggaaaggattccctatttaataaatggtgttgggaaaactggctagccatatgtggaaagctgaaactggatcccttccttacaccttatacaaaaattaattcaagatggattaaagacttaaacattagacctaaaaccataaaaaccctagaagaaaacctaggcattaccattcaggacataggcatgggcaaggacttcatgtctaaaacaccaaaagcaatggcaacaaaagccaaaattgacaaataggatctaattaaactaaagagcttctgcagagcaaaagaaactaccatcagagtgaacaggcaacctacaaaatgggagaaaatttttgcaacctactcatctgacaaagggctaatatccagaatctacaatgaactcaaacaaatttacaagaaaaaaacaaacaaccccatcaaaaagtgggcaaaggacatgaacagacacttctcaaaagaagacatttatgcagccaaaaaacatacgaaaaaatgctcaccatcactggccatcagagaaatgcaaatcaaaaccacaatgagataccatctcacaccagttagaatggcaatcattaaaaagtcaggaaacaacaggtgctggagaggatgtggagaaataggaacacttttacactgttggtgggactgtaaactagttcaaccattgtggaagtcagtgtggcgattcctcagggatctagaactagaaataccatttgactcagccatcccattactgggtatatacccaaaggactataaatcatgctgctataaagacacatgcacatgtatgtttattgcagcactattcacaatagcaaagacttggaaccaacccaaatgtccaacaatgatagactggattaagaaaatgtggcacatatacaccatgggatagtatgcggccataaaaaatgatgagttcatgtcctttgtagggacatggatgaaattggaaatcatcattctcagtaaactatcgcaaggacaaaaaaccaaacaccgcatgttctcactcataggtgggaattgaacaatgagaacacatggacacaggaaggggaacatcacactctggggactgttgtggggtggggggaggggggagggatagcattaggagatatacctaatgctaaatgacgagttaatgggtgcagcacaccagcatggcacatgtatacatatgtaactaacctgcacattgtgcacatgtaccctaaaacataaagtataataataatgaaattaaaaaaaaaaaaaagaaagtgagcaatgcccatccagtttcagacgccatcctcagcttagccccaccacacctcctagtaaatatctgttggatctttaggctgtgttcaggtctatcagttggtaaataaaacgggtccttcaccagagtttgagaagcattgctgaaggaatcagcagagggagagatgagtgttagaaggcttcatagaagagatagttcttaggccaggccctggagggcaatcagggttgaagtgaatgttgaagttcctcagtgctctgcccttggcctccatctcactttgtttgtggagcttatccattcccatgccctcaaacatcactttcaaggcaagcattcctccagacctgagttttcagctcaggaatcttttttaacatgaaacttgtagagacacttgcataggtataatgaattcagcatgaaccaaacaagtgcatgactttctccccaagttttgtcaatgaatctcaaaagttttgttgcgtttttattttcgttcagttccaaatattttgtaacttctaattttttctctgactcataagttatttagaagtatgctgtttaatttccaaatattttggaattttaaaaatatcttcacattattgatttctagttaattccataatcatactttatatagttacattcttctgaaatatagtgagactaatgacccaaaatacagtctcttttggtgaatgttctatgtccgcttgaaaagaatgtgtattctgctgtagtttagtgttctgtaagtatcagttaggtcaagcaggttggtagggttattcaaatcttttacgtcttagtttctgtttacttgttctatcaattacttagagacaaatgctgaaacctcaaactctaattatggatttgcatatttttccagtttgatcttatatatccatttttgtttcatgtatttgaagctctgtatttgaaatgctatccttagcatacagcaaattcacaaatataaatgagtctgtaatgctcaactctattttgttccatttatctatctatatatccatgtgccagaatcagattgttttaattactgtgactttagataatactttgactatcgttaaggcaaaccttttccctttcctccagttaatttttctttctcaaaaatatcttagctcttttcatacatttactgttcatttagaatgtaagcatcatctgggcacgttcttgttaagtttaatcttaagtatttcacatattttataaaatatacattttatatatgcctgttgctcaaagatatttttcctgttgaagatacagaacaggggttggcaaaaattttctttaaagggccaggtggtaaaaattgtaggctttataagacatatgatctctgctgatactattcactcagtcatcgccataatacaaaagcagccacagacaatatgtaaacaaatgggcataaaactttatttacaaaaaaaggcaagaagtcagatatggcctgtgggccatagtttgctggttgtagataaagagacagactaatagatatagagaaagattaatttttacatagttatcttgtatcttaacttcataataagtttgctaatactatttttgagttgagtctattatttctatgtgaacaacgtatgaacaaaagatcattttcttctagctttccaatatttacagcaattattccacttttgtaatcttactgcattggctagataactctggagcaatactcagctactgtgctaacaggaggtattgttttgttaatagggggggctctgtttttcacctacaaatttgatgttgctgttggtttctaaaaaatgttatcacgttcaagtttcagatacaatgcttgtattcaatcttttaagatcccttctaattcaaattgtttaattatgaagtaattaccagtttttgattgaggctatagacaaatgagtgttccagtgagcaatccatcacccccattgaataccaatgacttctttttacttaatagagaccttctgaatcttcttgttcaattacatgaacctcaagacaacatagaagaaaacgaattcttccgaggaattagaaaaaaattaagtaggaaataaaagtattttgctttagactttttaaaggtgttttcctttgaggtttttcaataaaaataaatcactaaaataacttttgagtgctaaaggtaaatttagctgaaaattcaataatgttctaaggagattgggggtaaaaggtccaaaggaagataaattactaactctaatatggaagaaaaaaatctaagatgtttatttctgaaaagctttggtctaacatgtaagcctcaagaacatacaactttaaaaatatgtatttaaaattgaaagttaataaatatatatatgcttatatttaaatattttaaaacttcctttaaattagcattcatatactcacaaaggtgtcaatgaaaatttcatgttcacattgcaggcagaaattgattcattattgatataaaattatttcaatcagtcaaaagttttcactttggcattcaccttccaagaatgaagtgaaaacaaatgcaattagtatttccatattcactcctttaatttccctggaaaactaaaaattagtccagctgtaaaaatatgaggcacacattaaagaagagacatgtttaacatcaagcattgtggaatttttctttacaagacgatttcaaggcccagataaataaaaatacttcaggcaatacacagtaaatattttattttaataatagcatagaattcttctgaagaaaattgttatacattatagctattattttacagtaacagagagaaaataaaattagagatacaaatattaaaggccaattatcaaaatgaaattaacacagattattattcatatgaacaatgtaaacagaatcatctatttgatttaacatcaaatatatttttggcatataattatttttacaatgagaattattaattattcaaccaattcaaatatactcattcagccaaaagaacaaaataagcctcttagaaattcaagatttatagattgatattaaacattttctcaatacatagaatattctgatctccattgagttaaactgtacaaacactcatatctattgttttatagcttataattaggtatagcttgtcaccagaactccttgtccaaaatatcactattaattgtacgaggcaaagtcctataataaaattactgtaataatggccacatcttttcaaaaacagaatatggaagtttccattttcatgactatgaatctggttttccaaaattgggttcccaaatccagtttctaaatgtttcaacagaggtgagaaagtaaaggaaataaatgatttaatggaactctggaaaaaaaactatcatagatcttagtttgaaaaatacatcaaacatgagagataccatgaatgactcagaattatataataatgcctatatcaaactttattagttagctaaagggcaaagagtaagaggcaagttaaaggtaatacttgcttttaacaaagcagactaagtaatatgttaagtgttagggtgggataggaaagaactcaggcatggcaaaagtctcctcttgggctttctatataaacatctattttagttttggactgttcaccgagaggagctctccctatccatgaaatgcttcccagaccaacaggtcttggtctagcagctgtaggaaggcagcagtatgaaaatgtaggaaatggaagccaatttgtgtccaaagttagtccaccctaactggactctttttaaactgggttattcaaatgccagcaaaaagtacaggctctagctaaagaacatgaatagacatctgtcttaaaaatgcctggaagaggtcatgattattggccttatgttctcccagaataagaacttacaaagtcctggaaatcctcagctctctccagccacctttccaaataaaatcttaatgaatatattttaaatcctttattgggctctgtaatcccttcaaccaaatagccaagctgcaatcgttttatgtaacatctgtttcactggaaaatgtgggaagttattttgatattgtctagcaagatcaataagtaaacactgatcaccccaagccaaatgatattgcccttcagggagcttttagaaagaaaataaactgataaaccaagaaagcagattgtatgcatagcaaagcccttcagcacagtgcaaacatgttctttatgaggaggtgcaaacccacttggtaatttcaagtgagaggcaacagaagtctttcttaatccaaagtcagaagtttccgaagaacttcaagcacaatatcgtaacaaaagtgatactgctcctatatacatatatataaaaaacaacagaatgttaagtaattgaataacagaatccactttcagaaaacacatttgtaattttcagccacactggaaagttcctaaaaagagcaaacatttaactataaacacttaagaactttacgtgaatacatttttaaaactatgaggaagataaatgatcaaaatatagctcttggcctagaactagttaccttaaggcttaacataactgttttttttatcattatccatattctattaatctaccctcccaatgactactaacaaatctgtgacataaatgatgtctttttatgacgtcctgataaccttgacagtttagtggcaagtaaatatctcaaactgctatccagaaatgttttaaaaataactttagatgttacttaaatagcacggcattatggacaaggcatgtgtttggacacgaggagacctcaacttcaggcttggctcctccccttctatctgagtgaccccatggagcaggctttattgctctgaatttgaagtacttggtcaggaataccagagaatcagagcaaaactaatgtctacctcaaacagtaggaattcaatgagattatgtcaataaaagagcttttaagtggtaaagtgttatgcaatgttaatctttatattcattattcttattattatgtatgtggtgaaagcttaccttcgtttgaaccatgccagaacgttgttctctcatttgggccactatatccatgatgttgaactgtaataagatgacagtaattttgtatgatccacatgggggaaaaacacaaattcacagattgccaaaaagggtgaaagagatgtcaagatttaatcagaaagatctcattttcactcacaagaaaatgtgctatttttaacttagcccaatggataaggaagactattttaataggttttcaggagaaagcaggaagcaatcattcataataagaaatgctctccaaaataagtaataaatttgcccttgtgtgtccctgtttgttatccaaaggcagaacttaaagcagcactgtaattctggaaaggcacagaagactttctctggccccaacaatagcatatctgtttcttatatgaagatccctgtcaactcacacggaaactgggagcaacagtcgacccaacactagattccagactgtgtgtggacaccagtacagctgggtgtggtcattgagttggtgcaggcctacaaaggtctgttgctggtccacaatgagtcaagaaactgggagtaagtgctcagaaactcttatggcaatttgacactggcacagcactgagaagtgtgctcaactgaacaggatatagaccagctcaggtgttgctgaacttgcctggagagtcacatgtgggacaagctgagaatgagtcgtttcagcaagacattgtggacacatgtaaatgttgtcaactgtaaccccaaagcatataaaaatagaaaacaataagcattcctttattttcatagcttatcatttttataattaaaatttttaattaaccctttgaaaaaacttttagttttttagagacagggtcttgctctgttgtctcagctgctggagtacagcggtgtcatcatatttcactgcaatctcaaactacaatcctccctcctcaacctcctgagtagcaagaactataggtgcgttccaccatgcccagctaacttttttatttttatttttgttacccaggctggtttcaaactcctggcctaaagtgatcctcagccttggcctcctaaggtctgggattataggcgtcagccaccatatctgccataaaaaaattttattttataatacagatatacaggaagttgtacagggtggccctgtgtatctttcacccagtttcccagatggtgtcatcttgtttaacaagatataatatcaaaaccaggaaactgacattgggacaatccacaaagcttaattcagatttcaccagttttacatgcaactgttagtgagtgtgtgagagtgtgtatgtgtgcatgtgtgcatgcacagagctccatgcaattatatcatatgtgaagattcatgtaactataaccacagtccagatacagagctgttccaccacaagacttcctcctgctatccctatagagtcacactcatccaccccaatctctaacccttggaaaatagtaatctgttctccttctctatgcttttgctatttcaagaagaaatagcaaaattcactatatgaataaaattgcacaatagctaaccttttgtgattgacttttttcccacccagaataacttggagatccatccaagttgttggtgtaacaatagtttgcttccttttattgctaaataatattccatgatgtggatatgtgccactttatttaaccatcaatttgttgaaggacatctgggttgttctggtttttggctactgtgaatataatctgctatgaacatttacatacaggtttctgtatgaacataaattttgattaatctgggataaatgccccaagagtgctattgctgggttatatgtcaactttagttagttttgtttttgttttctttccaagaaactgctcaattgttttccgtagtggctggtaccagtctacattcccaatgtctcatacatatgggtaatgtatgagcaatacagtttctccaaatcttcacataattctccaaatcctcaccagcatttccaaatcttcatcagcatggggtgctgtcactatttttacataagcctttctgataggtgtgtaatgctactccatcctggttttaattagcatttccccaagggctaatgaagctgagcatcttttcacgtgcttgtcatctgtatgttctctttggtgaactgtctgttcatgtcttttacccatttctgtttttcttttttttttaactattgatttttgagggttccttataaattctagatccaaggcctttgttggatatgtgccctgcatatagttactctctagcttgtttttttttttttatcctcttcattgggtctttcacaaaacataaaattttagtttgctttccctctgagatcagtgatggcaacaacgcctgctctcaccactcttattcaatatagcacttgacattttagtacagcaataagaccagaaaataagtaggatgtatacagattgtatacagatcaaaaaggaagagacaaatctatatgcacatggcatgactgtctatgtagaacacactaaagaatctaaaaaaaaaaaaacctacaaaacctctaagagctaataagtaatttcaacaagatcacagggtacaagatcaacaaatgaaaatcaattaaatttctacgtactagcaatgaatatgtggaaactgaaagtacaaacacaataccatttacaattgctccaaagaaaatgaatagggtaaatttaacaaaacatatacaagatctatacactgaaaatgacaaaatgctgatgcaagaattcaaaaaagacctaaataaatacacttaccatgttcatggattggaagattcaatacagtaaagatatcagctctctccaattaaactacagatttaaagtaatttccatccaaatcccagcaagttttgtgtagatgtagccaaactaattctaaaatttattagagaaagcacagaccctaggatagctcaaacaattttgaaaaaggagaataacgtgggaggaatcattctatctgatgttaaagcttactatatcactacaataatccaaagggtggtaccggcagaaggatagacacactaatcaatagaacagaatacggaaccagaaataggcccatacaaatatgcccaataatttttgacaaaggtacaacaataattcaatagaggaataacagaattttcaataaatgatattgaaacaactagccatcaataggccaaaaaatgaatcttcacctaaatttaataatttattaactcaaaatggactatggacttaaatgtcaaatatgaacttacagaattttcataaaagaacacaaaaaaattattcaggccctcagctaagtgatgagctgttagacttgatatcaaaacatgatccataaaaggaaaaactaataaaatacaatctcatcagaattaaaaactgtaacttctttaaaagcatttttttaattataatttaagattaggcaaattatggaaatacatttgaattactaatttttaatcagtttactgactataaaacaagcatgactggactgttcagttaagaaaagacacagctttccaaatgtggctgtagtggttaaccaaataatgaagatggaagtgactgcaatgaaatgaagacaaagagttatataattttcacttggagttatgattcctcatatattgagttttatagtcattattgattgtgaagctctaaaactacacttgtgttatttccaaagatgtactggttaacaaagcaaaggaaccattaagacttatttgtaatttacataaaaaataattaattcaaagataaaataattatcttaaagagaattagattaaaaagacaagagaggacttctggttccaaaataacagtgtagaagcaagctggcttcacttctttacaaagaaaaccaaaaccaaatatacagcactgaaattatcaccaacaatatcccagaaatcaaatacgaggagaagacagttcctggatccacagagatgggaaaaaaactctaagtaggcagtaagagaattgggtttccacatctgcaatgcccatttctccaatttgcccagcaccaagagtgcaaaaaatctccacctgattcatgatttctataccagaaaaggtgacatccaggtttcccaccatctgggttacctggcaggaaacctgtccctacctcaacccacaggaagcactacatgtgcctgaagaaagaaataccctgagaagagtcagaaacaaacaggtgaggtgggactaccatccccagccctggaaactctggtctgtaactcagctaaaggagatgccaaaccagagtggttgtttagtagcaccacattgcagaagatacattgcacaggacccctgggcatgaatctctagccacctttcccacactgccatgatatctcctttgagactttccctaattggaatgagcagctctcttattgtttactggagccaaggcaaacttggtcgtaaggtgacatctagtgccaaaaagaaggcagcaacttagcccctcaccaaaaaaaaaaaaaaaaaaaagaaaaaaaaaattcgacaggtaaattacatagaatctataaccaaatacattcaataaaaaacaaaaataagccagacagagaacactggaataaataactaatccttcattcaaagacatcaatacaagatatatatttcttgcacatccagaagaaactgcagtcaacacaaaaccatgacctccccaaatggataaagcaaggaaccagtgactgaccctcatgagatagccatataagagctccctgatcaaaaattcaaactagtattaatagctttgaggaaactcagagatctccaaggtaacagaacaccaattcaaaaatttattagacaaacttaacaaagagattgaaataatttaaaaatcaaatagaaatcttggagctgagaaatatattagctgaactgaaaaattcattacagcctcacaatagcagaatgaatcaagcagaggaaagaatcagggagcttgaaaaccggctacttgaaaatgcagtcataggtggaaaaagaataaaaaagaatgaagatcatcaccaaatatagacaattacctcaaaagaccaaatccaaaaattactggtgttcaagagggagttgaacaagagcaaggggtaggaagcttattcaaagaaataataacaaaactttccaaaatgcaacagatataaatattcaggtataagagcatcagggccgggcgcggtggctcacgcttgtaatcccagcactttgggaggccgaggcgggcggatcacgaggtcaggagatcgagaccatcctggctaacacggtgaaaccccgtctctactaaaaaaatacaaaaaaattagccgggcgtgatggcgggcgcctgtagtcccagctacttgggaggctgaggcaggagaatggcgtgaacctgggaggcggcggagcttgcagtgagccgagattgcgccactgcactcccgcctgggccacagagcgagactccgtctcaaaaaaaaaaaaaaaaaaaaaaaagagcatcagagaacaccaaacatattcaacccaaataaggctacaccaaagcataaaataataaaactctcaaagctcaaggataaagagaggatcctaaaaagtagcaggagaaaagaagtaattaacatataaaagagctccaattcatctgacaattgactctcaacagaaatcatataggccaggaggaagtgggataaattttcaaagtgttgaaagaaaaaaaaaacctgttatccaagaacactatattcagcaaaggtacttttaaatatgaaggagtgataaagtatttttcagataaacaaaatctgaggattcaacagcagcagacctgacttacaagaaatgctaaagcgagttcttcagaaggaaaataaaaaaatacaaaaaaccacatacacattcaaaaagaaaacttttcaaggcataaaatccactggtaacattaacaacatggacaaaaccagaatactctattattgtaatgatggtgtgcaatccatgcctaactctggtatgaagctgaaagataaactcataaaaagccgtaatagctacagcaacctattaagagaaaggtaatataaaaatacacaaatttagataataagcagttgaaatgtggtggggatggagttaaagcatagagaatttttttaaaattttttctttgtttctattctttactttgtgatctaagataagttgtcacttctttaaaatagcttattgagatccactcaaggcaaaaagaactgggaagtccccacagctgtctgctgggcagaaaaccctaggctatgggtgccacatcagctatacacccacggcaacaccgccctgcctggagatctcacacccctgacctactgcatcaacaaaccatctgtaggtctactgcacaattagctctgactcccaagcacagaggatcagcaggcctccagtgtgctgtggatctcctggtgacctaatctttggctcgagctgccccaagggaggagagagcacaggctgccagggttccccttggggttaaagagatgtgggcatggtgccagtgactggagggggctcccctaaggcctggaaatggacctggcaggggatcatcgctaccccttcccaccacccccactgctgcaaatgtgctggaatacaaaagagccatgtgactgagagtctatttgccggccattattctcaagcaccatctactggattgaagcctaaattacaacaccccaaactcttccagtatacactgcctgtgaaatccagtgccagaatctagccacaagtattaataaatatcccatacagagtgttggccctctgaaagcacccagaaataaagccaactgactatactcagcttatgctacagtcaaacccacaagggatacaaagaatataaaaacaaaaagcctcatcgaaatgatagcaaattcaacaagataaaagaacacgtgccctctcagaagagaaagatttaatgcaagaactttggcaattcaaaaagtcagtgcctccttatctccaaacaattgtactagctcgccagaaattgttcttaactaaattgagatggctgaaatgacaaacatagaactcagaatctgggtggtaaggaagcttaatgagattcaggagacagctgaaacctaatccaaggaatttggtaaaatgatccaagagttaaaaagttgacaaagccattttaagaaacaaacaaactgaccttctggaattgaaaaattcactacagaaatttcataatacagttggaagcattaacaacggaatagaccaagatgaggaaagaatctcagagctcaaagattggtccttcaaatcaattcagtcagacaaaaataaagaaaaaagaatttcgggccaggggtggtggctcatgcctatgatcccagcactttgggaggctgaggtgggaggatctcttggggccaggagtttgagacctgcctggccaacatggtgaaaccccatctctactaaaaatacaaaaactagtgaggcttggtggcacgcgcttgtagtcccagttactcaggaggctgaggcatgaaaattgcttgaacctgagaggtggaggatgtagtgagctgagatcacgccactgcactccagcctgggcgacagaccaagactctgtctcaaaaaaaaaaaaaaaaaaattgaaaatgaacaaaacctccaagaaataagagattatgtaaagagaccaaacctatgactcactggcatttctgaaagagaagaagagtaaacaacttggaaaacatatttgaaaatatagtgcgcaaaacttttcccaatctcactagagaagtcaataggcaaatttaagaaattcagcaaagtcctgtgagataccatacaagatgaccatcctcaagacatatagttaacagattcaccaaggtcaatgcaaaagaaaaaatcttaaaggcagctagagagaaaggtcagcttacttacaaaggaaatcccatcaggctaggagtagacctctcagcagaaacttacaagtgagaagaaactgtggacctattttcagcattattaaataaaataaactccaaacaataatttgatattcttccaaagaaagcttcataagcaaaggagaaataaaatccttttcagacaatcaaagctaaggaaattcatgagcactagaccagtcttacaagaagtccttaaggaagtgctaaatgtggaaatgaaagaacagtacctggcaccacaaaaacacaagtacatggcccacagacaccataaaggagatacacaatcaaatctacaaagcaaccagccaacaatgtgatgacagcatcaaaatctcacatattgatataaaccttgaaggcaaatggtctaaatacccaacttaaaaggcttaggatggcaaaatggattaaaaaaataaggcccaaccatattctgtcttcaagagacccatctcacatgtaagaacacccacaggctcaaagtaaagggatggagaaagatctatcatgcaaatggaaaacaaaaggaaagcaggggtcactattcttatatcagataaaacagactttaaaccaacaatgatctaaaaggacaaagtagggcattacacagtgacaaagggaaaaattcaaaaagaagagttaactatcttaaatatacacacagctaacattggagcacccggattcataaaacaagttcttctggacctatgaaaagacttagtcacacaataatattgggagccttcaacacccaactggcaggattagagagatcatcaaagcgaaaaattaattaataaagaaattctggtcttaaattcaacacttgaccaattggactcaataaatatctacagactagtccactccaaaaccataggatatacagtcttcttatctgcacatggaatatactctaagatcgactatatgctcagccataaagcaaatctgaaaaagattaaaaacactgaaatcatctcaagcatactctcagaccacagtacaataaaaacagaaattactaccaagaagatctcccaaaactacacaattacttggaaattaaacaacttgctcctaaatgacttttgggtaaacaaatgaattcagaaatcaaaaaaattctttgaaattaatgaaaacagagacaaaacaaatcaaaatctttgggatgcagctaaagcagtgctaagagtatagtttatagtgctaaatgcctacatcaaagaagttaggaagatcttaaatgaacaacctgatgtctcacctagagaaactagaaaaaaagaacgaatcaatcccaaactagcagaagaaaacaaataaccaaaatcagagcagaactgaatgaaattaagatggaaaaatgcatacgaaagatcaacaaacaatttttttttttttgagatggagtctcgctctgtctcccaggctggagtgcagtgacacaatctcagctcactgcaacctctgcctcttgggttcaagcaattctcctgtctcagcttcccaagtagctgggactgcaggtgcatgccatcacacctggctaatttttgtatttttagtagagacggggtttcgccatattgatcaggctggtctcgaactcctgacctcaggtgatccacccgcctcggcctcccaaagtgctgggatcacaggcatgagccaccgcgcctggtctgttttttgaaagaataaacaaaattgatagactgctagctaaacaacaaaaaaaggaaaatctaagcccaatcagaaatgacaaagatgacattacaactaatcccacagaaatataaaagatcttcagagattattataaatatctatgcacacgaaaaatagaaaatctagaggaaatgagtaaattcctgaaaactcccaagattcaaccaggaagaaattcctgttcaagaaaacctgaacagaccaataatgaattccaaaagtgaatcagtaataaaaatcctaccaaccaaaaaaagccctggaccagacggattcacagctaaagtctaccacatgtacaaagaagaactgctaccaatcctactgaaaccattccaaaaaattcaaggaggagggactcctctctaactcattctatgaagccattatcaacttgataccaaaatctgacagagacacaatgaaaaaaaagttcaagccaatatccccgatgaacatagaggcaaaaaaaaaaaaaaatcctcaacaaaatactagcaaaacaaatgtaacaacacatcaaaaagataatgcactatgaccaagtgggatttatccccagaatgcaagtataatttgacatatgcaaatcaataaatgtgatatatcaacagaatgaatgacaaaaaccatatgagaatcttaatagatgtggaagaagcatttgataaaattcaacatgctttcatgataaaaaaaaaaaactctaaacaaatgaggcatagaaggaacatatctaaacacaataaagacgatatatgacaaacacacagctaagatcatactgaatggggaaaagctcaaagcctttcttctaagaactggaaaacaggtcaagaatgcccacttttaccactcttattcagtataatgttggatgtcctagccattgcaattagtcaagagaaagaaataaggggcatccaaattggaaaaaaaggaaattaaattgtccttctttgcatgtaacatgactatatattcatatattcatatatatatgtatatatatatatatcccccaaaactaatgactctaccaaaacactctaagaactaataaactaattcagtacagttgcaggatacaaagtcgacatacaaaaatcagtgatatttctagactccaataacaaactagctgaaaggaaataaagaaggtgatcttatttacaatagctattaaaaaaaaaaaacacctaggataaatttaaccaaaaaagtaaaagacttctatgaggaaaactataaaacactgatgaaagaaacgaagaggacagaaacaaatggaaataatcctatgctaatgaattggaaaatggaatactatgcagccataaaaaaagagtgacatcctgtcattcacagcaatatggacaagtctggagaacattgcattaagcaaaacaaggcaggcacagaaagataaatactgcatgttctcatttatatatgagagctaaaaaatcaaactcatggaagtcaagagtagaactgtgggtattaaagatgataaggaaaggttggctaacaaatacaaaattaagctagataggaggaatgagctctggtgttctgcatcactgtagggcaaatatggttaattataatttattgtatatatttaaagagctaggaaagaagatttttgatgttcacaacacaaagaaatgacaaatgtttgaggtgatgcatatgttaactaccttgatctgatcactacacattgtatacatatatctaaataccactctctgtaccccacaaatatgtacaattattacatgtcaactaaaaataaaaggaaaaacaacatagatggaatcattttaacagataaaacttgagaataaaaataatcataaaggaaatattgtaatcatcacatctgattcctgtgtctatctcttagctggttccaaattaaaaacaaaagtaaaggattgtgaattattgactcaaactcaattatattattatgtttattttgcaaatgagaaaactagatttgagagaggatgagcaatttacccaaagtcaccaaaatctaaagtatgtggcaaaacaggcagtcaaacagggacccctcattaactcagaagtctacattttttctcacattcttatgtgcttgtcacttatattcattaaaaacaggcacattccatcaacattctctagtaagagtctaaacaccccgtgtaagatacagggaaggaaaaggaaatggaactcacattttctgtgtatctattatgttccagacactgtcctaagccattatttacaatacatactttaatcctcacaaacacccccaggaacctgcagcaagttcggtgagaatcaggtatccaaagctcatgtgcttttgatttactaagttgcttttgaagaccaaatattagtcttccaaatgatcaggctattaaatgtagtgtgtaaacaccaacagcatcagtgtatctgcttgattcacacacttactgaacagttctttacgatggcacagaacacgacatccacacataggaacacccctgtccggcctatgccggcactgcagtgaacaaccatgggtcctgtaaggtggctcttccttgcataacgaatatattttatgaagctatctgctgaggcaggagtgccatggtctggccacttggtgaactgcaactgttttacagagtgactagttcccgtctgttagagaaagaaacagagcgagaaagacatttattgatttcttatattagagacctcacgccaacttctaatattcaaatgataataataatggctatatggtattaccttggtattatatagaactttcaaaaagtactcaaacctctttttgatgtttataagaattctggaagttgctaggaatagaggttttctccattttacaaaggagagcacagtaacaacaataaaaataccagtattaacaggtaacaaaaattaagcacttgctatgtggcagttactatgctaggggcttcacatgaattctctcctttaatcttcacatcaaccatgtgagataggcaccattttatctccattttacagatgaaaatttaaggatgagggggacgagagatgtatgctaggtcagaaggttcacacgtttagagctggaactgtaatgtaggtgtcttgaattctaatctaccatcattcttctgtaccatgaggctacaggaaaaccaagatttcaaaatgcttagagtgagagatggactgtcatgttaggaataagaccaaaaggcaaagtatcttagtttagaaatgacatatgaaatttaattaagacatataggtgtctgacaagagaggcaccgatctcttccagcgatgaagacagggtagtcaatgaccatgagagtagattgtgggtcccactattgtgctgagcccccttgaagtggagtcatgaaactcttcccagcattgtcagataaagcactttgaatttacctatatctcatccaaagggatcatgaccctttcctcagtgtggggcccttattttatcacacatgggaccctaatggaagaactcaaaatgagtttctcacttctcctatgcttctcccgaatgcacctctttttcctaagctttctgaataaagatgctagtgctcagagctctattctaatccacagtgtcgactgaaatttgtgatagttaattttatgtgtcaacttggctgagccctggtatccagatactaggccaaatattattttgtgcctctgtgaaggtattttttaggtgagattaacatttaaattggtagaatttgagtaaagcaggttattctccataaagtgggttggcttcatctaatcagctgaaggccttaagagaacaaaaactgacctcccatgagcaagaaggaattctaccagcagattgcttttggactcaaactccaattcttccctgggtcttcagcctactttcccaccctgcagatttgccaaccctccacaatcacttgaaccaactccttaaaattaatctctctctctggatcagtcccataacctgtattcagggatctcaatgttatactgctagaaaaatacacataatcacatattttgttgctactacaaatgtatgggtcaaacctcagcatcactcagcaacccttttcctggtgattgtgctccaatcaacttctttggtgatgactccaaaactcaccattctctgcaagtttcctgttcaactcctattcccttcactcgtgttaacacatgtatcacctacctgccaactgaatccactagagcaatctaactcattgctttctcctataaaccattccttttctgttttctaagtctattagaccaaggaatccatgaattattctagaccaatgcttctcaacagaacttcctatactgaagcaaatgtcttaaatagtggcaatatagtagccactatcaacatgccactcataagccctaaaatgtggctacttgcaggtgaggaactcaatttgttattttacataaatttaaataacttaaatttaaacttaaatatccacatgtggttactgtattgaatatattttcaacccctcctctgtcacttataaatcataagtcataagtcacatatgtctcccaattttatctgcaaaacacttgcgtctgtgctttccacccccatgccaacagccgtagttgatcatgtcacttactaaaattcttcaatgtctcccaattatcttcataataaagttcatgctacttagctgaaatttaagacatttcacattctagctggcccctgcttacttttgagaacctcatctcatcttttattactccctggcactgaacttttacatttcagaaacacttaactacttatatttgtctctacacacaccttatgctattttatattttgatcatctactttctccctccatctttttcatttgcataattctcaaaacaaatgccacctcctccagtaaacctgtctcaaaaccccaagtaaagccaagtgtttaccttctgagccccaaagtgcccaagacatatctcaacattatcactgaacacggtaagttaggtatctatcagtgagtgtaaccaacctctccactattcggtaagtactgatagtgcctggcccagtgattagcatactttaaggactcaatacgtatctgctacatttggcagaggcaggtataacccagaatcagacaacttcaacagtcactctccctgccccacctctcttttccaattttttcttctccacagaatctggttgaggagaagtagaagtggtggtggcttctggtaccagggacaagtaaaaagttacttaagaagtatcatcgatcgattttccatcctactcctaacttctagttctaagacatctgcttatgtggtgaaacatatatctaatactgatgtttaaaaacttacggacttctccacaacttgaaacattcgaatgatgaaatattgaagtatctggtagttctccaggaatacacggaagtgtttcaattccaatggcttcttcagagaaatgggccagtaatggtagcatttgataattccaccttctatctctctggttatcatggcaataacatttgaattattttccaacaccatttgccaaaagtcatctatggtgctcagcagtggtccttgagtagcgatataaaaatactcttctccacaattgactattctaatataactagcattgatgtagtccttgctttttccaagaggaacgcgtgttgaatcatctattacagaaacagaaacatctggtagataaaggtgggagatacatcacacccagacttcacgaaaggatttcacacatgtaaatccatatatctctttgaccaatagagaagatggcctaggagtttcttttcaaaatggttgagtccatgagtttaaattatttcctccctgaaaactattggcatgacctaagaaatatacaattatgggatgtttatttttcaaatcagtttttaataaatgcagaatgatatcattagcatccaggtacttttggaaatttctgctagaagtggcatgggcaaggttaagtcaagggaagtatcctatagtttgcaactgaacacaacagaggagaaactctttgtgggagtaaatgagtgatattatcctgcaaatctgaaacctgcaaacccagagcagcaggggccaggggaaaaaaaaaatctgatagttgactgcagacaaattctaggattaatggaattccaccactgtccccaaactagacagccatattttatgtccattctcagccttcatctggtgataggacatgttattcaaagcaaagatattgtggcaaaaggatgctaccaagggaaattgctccaagtaatatgggactcatctaacatggactgttataacaaatatgagagggaaaaccagctatttggcctactaaccttcactgctccaggagttccttcttcacctgacacagacatctgaagctctggttccaccaccatccccacagtgagagcagaaacacacacagcaaaggaggcccttctctgccatgcagctctctcaccaataacctctccttactactcagaatcacatggaccacttatctagtaaatatgctgacaagacctgaacaggcatttatataatatctggcagaactcttctcaaattttaacatagcacacagaaactttcccttgtaaatatgaatgaacagaaaaaatcagccaggcgcggtggctcacatctataatcccagttactcaggagactgaggcaggagaatcgcttgaaccagggaggcggaggctgcagtgatctgagaccgcgccactgtacttcagcctgggtgacagaatgagtgagactccatctcaaacaaaaaaaaaaaaaaaaaaaaagctagatatataaagatacccggtatttcaaaaagggagaccattctaaaaaatcacaacaaatattctcctttctataaaagatgataacaccttaaaaactcctatttgtatattaaataaaattcaagagagcattaattatttaaaacaatactttatacctatgtttactaacaaatatgttatattactaaattataaaggtgataacaatggctttgtagggagatctttcatcatatttatgtagatatatgatgatatatgtcatataataataataagcctggcaagtgttcatcacaatgttagcagtagttattacagtatctaaaccatataaattacttcatagtaaaaaaagcattttttaaattttgaaatgagattaaatatgtgaaaattaaataatctaaaataataaaagcttgatttcatataaaagtcacaatcattcaactcaaactcctaaagcaggaattgaacagaaaaacaaatttatgtttagaaaatcagcttaaaaaattttcccagaactcagaaaaaaaagattaaaaaaacctacaataatgattaaaatggtaaaagacacagcgcatacaaggggaatgtaaaaaacgaatttcagaagcaaactgtggaattcactgcagaaaagaaataattcaagtgatcataggaaagctccctaaacagaagcaggagtactaacagaatgcagtgaaacatgcataccaggttcaagcagcatgatacgctacatgtatcaccttgtcaactccaaaacaaacctttgagggaggtgctattatattcatacttttcaaataaagaatctgtacaaagtaacttgttccatattatgcagcaatcttctagactccacagactaggtaaatctagactctggtccaaaaataattccatgctctgttgtccatcaaggaagactcaagtttgcagacagaaaggcctaagtgtcagacaacattaatgaagagagccactaagacccctagaccagcagagcataaggccacaggaacaggaacaggaagcaaaaattatgctaatggatgactaggggtaatggcaactggtgccactcccatttccaccccttgattcttgaatcttggctatggtagaaacagcatcatatattggatgctgacatggggcatgtataatctcctgaagaacattaccccagccctgcaaggtactgccacctagctttcactgtaattgagtcttcaaaaggccattcatccattctgtcaagccagccgctttgagaggataaggaatatggtaacatagtggcaatgaggccattgccacaaggtatttgccacaaagtgagttctttgattacagcaatgctgtatggaataccatgatggtggataaggcattctgtaggtccacagatggtaaattggtgggagcactgtgtgcagggaaggcaaatccatacccagagttactgtctattctagtaagaaaaaagcactgctccatgcattatggaagtggtcccagtgtaatcaacctgccatcagctagctggctgatcatcccatggaatagtgcccatcaggtactcagtgttggtctctgttgctggcagattggacactcagtagcagctgtagccaggtcagccttggtgagtggaagtccatgttgctgagctcatacataacctccatccctgccattatggccactttgttcatgagacctatgggcaatgacacaatgacaggggtgactgggggtatagtctagctgatattcatagagcatgtcactctattcacttgattattaaagtctgcccctgctgagatcaacctttggtgagcattcacatgggatacaaatatctttgtgtttgtgcctatctagcaagatctattcacgtgcctcttccccagaccttattgtcaccaatttttccaaccatgttccttcaaattccctgaccatccagctaagccattaaacatagcccatgaatcagtacacatttatacgtctggccatttctccaagcaaaaaacaaaaaaacaaaaagcaccaagtgcactacccaatgttctgcccactgggagttatttctcttcaccactgtccttcagagatgtctcaaaaaaggggctgtagtgctatagctgtcctcttctggctggtacctttatatcacgcagaaccttctgtagaccaggtccaagtcttctcttcttctgtcagctgatcataggcaactcctcatgagacaacaggtgctggctgaagagagcaggtaatgtagcaggggtgggaacagtgagcatttgggcagcttcttcgtgtaacttatttgtgccttcaggatctgctcaagcccaatgttgtatctaccactttcatttgatggtggagtgctgctgtgtatgcccaactttatggcttggtggcccatagttaagcattctctacttagttctctatgaagcagtctctaccaaggcccagtagcaggccaaaagctgtttctcaaaaagagagtccagagagggtggcaggaatttgctctaaaatcctacgtgcctgcactgtgattcatctaaaggggtctgccaaaggtccaaacagcacccttatctgccaatgacacttcaagcaccactggatctgctagatcatacagcccacgtggcagagaggcttgcatggcagactgatcctgtttcagagccttctcttgttttgggccccactcaaaactagcagcttttcacatcacttagtaaatggaccagagtagcacatcaaaataaggaatgtttcctccaaaacgccctggttcactagccattgtgcctcttttttgcttgtaggaagagccagatacaatttatccttcaccttatgattatctccacatgtcccacaacactggacctctagaaatttcactgaagtagaaggccactgaatttttgttggatatatctcctaccctctgacagacaaataagactaaagcatttgctacttcttgttcactagatccaatcagcacaatgtcatcaatgtaataaacctctgtaatatcctgtggaagggaaaggtgattgagatccctgagaactaaattacaacatagggctgaagagttaatacacccctgaggtaggacagtgagggtgtattgttggccctgccagctgaaagtaaactacttttggtgttcttgattaataggtatagagaaaaaagcatttcccagatcaatagctacatagcaggtatgaagagatgtgctgattttctaaggcaatgaaactatatctggtatagcagctgcaactagagtcaccatctgaggaagcttacaataatccactgtcattctccaaattccatctcttttttgtgtaggtcatataggtgagttgaatgggatgtgatagatatcaacatcacttcatccttaaagtccttgatggaggcattaatatcagcaatctcttcaggaatgtagtattgcttttgcttttttactattttcctaggtagaatcagttctactggcttccactggccctttcctgccataatattcctcactccacaggtcagagaagcaatgtggggattctaccagtttctgagtatgtttattccaattattcattccagggcttggaaaataatcacaagatggttttagggacctactgagtccactgtgaaatgaacttgaactaaagctccattgactatatgacctccataagcccctgctttgatttgtagaccacagtgatgttttgggtctcctggaattggtgtcagttcagagccagtgtccagtagtttctgaaagttctgactattttctttttccaaatgtacagtcaccctggcaaaaggctatagatccctttggagaaggctgaaagattaacagtatacatttttagcagtgtgccagggtcctccctttcattcaaggtgttctctgtgtgtaaactggctcaagtctgggaagttattgactggttgtgattctctgttcctatggttcaggttagaattttgctcacttgacctagaactcttctgcttacacctatcaaggaagaattcagtagacgtcccatctagttcacttctaggaacaccatgatcaactaatcaacaccacaggtctctacaggtcagactgttctgattgctgctttgactctgctattaccataccatgctcaccttgcctttggctatcaagtgccaccacctggcccttatctctctgggatccaattatacccactgcattcaggtttcccaactcagtggcagcaatttccactgcaatatctgaactacagagaagaacaatcacagtattcttcaaggattctgggactcacctcacaaatatatttctcacagttatgagaaaagtacatcctctggacctcctggggtgggttggcaggtcttaaatgataaacctaatctaatattccaatctccctaatcctttggatcacagtatatagtatatcgaggcagttctggcattttatcttcatttagactgggccaccttttggtccatttaatacaaccaaccaaataaactgtaagagctctttctaactccctaatccacatattaagtccagaatctcttctttgtggtcccatttcaataaattcagcctgatcaaacactaagttccttccaccattgtcccacacccttaaaatccctccccacaaatatttcccagatttctgtcagtataaattggaaaaatcatgtagctcttttgtagtgtaacatacctccccatgggtcacactttgtaccttacctttaagggcctgctgggacttgagtctagttataggtctagaagcaatgaaggatggtagctgtgagtcttgagaagaatcagcaatgtcttgcaaggcaacaaactcaggggaggtaataaaagtttcctcaggtaaagtagcattaatctcctcagatgggggtggcatggctgcttttactggcaaggaagactcatcagggtcaaggggttcgatacacccagctttataaggctcttcacatatgtctgcactccagttttcaagatcccattccttctcagttaatgccctcattttaacagcagacaccctaaaagggtggggattcaatttgcactgtaattcagccattttcaggatgagattttgggtttggttttcaataatctcagctttgttgttataaaatataagagtttctttcagggcagaaagagaaacttttgggttattcatgcggcacttgagctgggaaatttaatccctaagatcatcctttccttctctacattaggagtaactagccaatctcattgttctcatgagaactcaaaaatgttctaaggtatcaaatacagatgcccagaaccttgcttcttgtaaatgtctgaataggattacctaatggcaatactttgcatatctctactgtcacattacactatgaattattaatactctattcactactgaaaagtcattaatgcctttacatcttatcagattagggaagtaattcataaaactcatccttaaaattctgttcctctagaattgctctcagtaccaaattctgttactctagattctctagataaatagaatcaataggctgtatatatacagtgagaaagatttattttaaagaactgactcatgattgtggggactggcaagtcaatatctgcagggcaggccagcaggttagaccccagggaaaagttgacattgtagtcttgagtgcaaaggcagtctggaggtagaattccttcttcctctggaaattttagcgtttttttcttaatgacttcaactgactgaataaggcccactctcgttatggaggctaatcagctttactcaaagtctgctaatctaaatgttaattacatcttttaaaaaataccttcacaccaacatctagactaatatttgaccaaatagctgagtatcatagcctagcctagttgacacatgaaattaaccattaaacaagctaaaaattttagtagatgatttgaaggaggaaattttttaaaaacttatattagtttcctataaaaccaagtgaaagaaaaaaataagaataaaaatgagagagagagagagatagagaaagtacttgcaaaactacagaggtaaaagaagtaacgagaaaaggttttataagatagaaccaagaggcaaccctaaaattcatagaaactaaaaaaaaaaaaaaaaaaagacaagagtagactgaagagtagaaattacaactaaaggaagatcaattaaagggtttatttgtctaggtaagaatgatggaaatgaagcatacctggtaacattatttaattccaggaaaatagttaaagattttgaaataaaagagcatatttctcatgaagaaaaggagtcagatggccattacagttctcatctaaaacactggaaggaagaggacagtgaagtaacactcagggaaaaaaaatgagaaaaaaaagaactaaaacccaagattcctaaaaccaacaaggatattcgtttatcaggataaaaaaaaaaaaaaaaaaaagtagagcttgagactgcatcaactacttatacccatctccaatcaaacaattaattcatcagaacagtgatttcaaattaagggaaaagggaaagaaaatgaagtaatagcaacaaatactacaaaacatagtttcatatctataagaagaatgacgagagccaggcattccagctacttgggaggctgagacagaaggatcacttgaagccaagagtttgagaccagcctaagcaaaagcgtgagtccctgtttctaaaaaaaaaataaatgaataaaaaattagctgggtatggtggcacatgcccatccccatagtcccaactacttgggaagctgaggtgggaggattgcttgagctcaggagtttgaggtttcggtgagctatgattatgctactgcactccaagtagactctgattcttaaagaaacaaaacagctctgtgcggtggctcatgcttataatcccagcactttgggaggccgaggtgggtggatcacctgaggtcaggagttcgagaccagcctgaccaacatggagaaaacccatctctactaaaaatacaaaattagccaggtgtggtggcacatgcctgtaatcccagctactcaggaggctgaggcaggaaaatcgcttgaacccaggaggcaaagggtgcggtgagctgagactatgccactgcactccagcctgggcgacagcgagactccatctcaaaaggagaaaaaaaaaaaggtttcttgaaataggaaagaaaacaatgtacaataaatacagtggtggttaggcctgggtttgaatcccagatctctctcctatttgcagtgtgaaagtgagaaaattacttatctcttttagcctttctgtaaacaaggacactaacatactgacaccttagaggtaggttgttgtggggattaaacattactacctataacagacttaaattagtaataagcaatagtaataaacatattagtgttactactactattattattagtgggtggtagtagcagaaacaaacatagagcaacctcaagaagtacagaaagaagcttgttaaatctctgccttgaagagcttgttttcccatctatctatattataatgctgaagtgtatgaaaattttttaaaagtgtaatataccttttgcactcacaaaccacctttttaacagtttatggaggtaaaactgtcatacatgtgcacccatgagaccaccaccacaataaagataattaaacatctccatcagtgcaaaactatcctcatgcctctttataatctatccttcttgctctcatcttgccccaaggcaaccactgagacgttctgtcaatacaaattagtttaaattttctaacattttatatatgtggaagcatacagtatattagttttctaggtttgaaatttattttcacattctggaggctggaagtccagtattgttatggtttggatgtttgtcctctccaaaccttatgttgaaaactgatccccaacattggaagtggggcctaatgggaggttttgagtcatggagacaaatcactcatgaatagattgatgcccttcctcagggttgagtgagttctcactctattcactgccgcaaaaaccgattattaaaaaggaccaggcacctctctctctccctcttgtgtcctctttcaccatgtaatctctgcacatgctgattccacttcaccttctaccatgagtggaagtagcctgaagccctcactagaggcccaatcttgaaccttccagccagcagaactgggaattaaataaacctcttttatttataaattaaccagccccaagtattcctttatagcaatacaaaatggaataagacagaaaattggtactgagaattggggtgttgctataaagatacctgaaaatgtggaagcagttttggaactgggcgatgagcggaggttggaagtgtgtggaaggctcagaaaaagacaataatatgagagagtgtctggaaaaagtgcccaaaggcacttcagaaatatttggggccaccccttccctaataggcccaaggccttctggggacagacctggagcaccactgcccttggccacctcaggatgctgctccccacatcctggctgctctggctccagcagtgggtcaaatggccccaggtagggtttgggccactgctcctgaggggctaagtggtaagccttggtggcattcatgtggtgttaagtctgcaggcatccagaatgcaagggacatggaggcttggcagctttaacctaaatttcagagaatatattaaaaagcctgggaaagcaggcagatgcctattgcaggagtggagccaccaaagagagcccctaccaaggcaatctttagtggaaatgttgggttggagtttccttagagtccccaccagggcaactcttagtggacccacaaaggtgctggaaccccacaatagtagagctatccacagcattccacctcagcctgaaaaagctgcagcattattacaacccatggaagcagccagtggtctacgcccagcaaagctatgggggaagggctactcaaggccttgggagcccaccccacacaccactgtgaccaatatgtaggagatagagtcaaaggagattattttggagctttaagatttaaagtgtgccctgctgtgttttggacttgcatggggcctattatccctttcttttgaccaatttttcctttttggaatggaaacatttacccagtgcctgtaccaccattgtaccttggaggtaaataatctcttttttgattttacaggcttacaactggaaagaacttactttgagtctcagatgtgactttgaacttttaagttggtgctgaaacaagttgacttttagggactattgggaaggaataattgtattttgcaatgtggtaagaacataagttttaaagggccgggggcaaaatgctatgatttagatgtttggcccttctaaacctcatgttgaaacttgattcccaatgttggaagtggagcctaatgggaggtgtttgagtcacaagggcacatccctcattaatagattaatggcaggagtgagctctcactctattcgttctgcaagagcctggtacctccccatttctctcctgcttcctctctcaccatgtgatctctgcatatgctggttttacttcactttccaccatgagtggaagcagcccatagccctcaccagatgcccactcttgaaccttccggtctgcagaactatgagctaactaaatccctttccttcataaattattcctctatagcaacacaaagaaactaagacaaagatcaaggtggcagcaggcttggtttttcctgaggcctctctccttggcctgccaatggctgccttcttgctgtgtcttcacatggacctttctctgtgcctttggatccctgatgtctcttgtgtgtcccaatttcttctttatataaggacatctgatggattggattgggcacactctaagaacctcattttatattaattactactttaaaggccctatctccaaatcaggtcacattctgaggtacaaagggttggaacttcaacatacaaattttgggagaatttaatttggctcataacacacagtatatactcttttgactggcttatttcactgagtaaaattattttaagattcattcatgttgttcaatgcattgttagtcattttttattgcctagttgcattctattatgtagacataccacaatttgtttattcactcttccgttgatgggcatttgcactgtttccagtttttggctattataagtaaatctgatatgaacattagtatataagtctttatgcagacatatgctttaatttctcttaggtaaaacatatgaatagaactgctaaatcatatggtaggtacatgtttaactttattagaaacaaattccatttcattgcagtgagtgtaaaatggtatctcattatggttttaatttgcattttcctaatgatttacaatggtgaatatcatttcatgcatttatttgccatccttatatcttccctgagaagtgtctgctcaaattttttgctcatttagtgttgggttatttgtcctcttcttgatttgtagtaattatagattataaatataagtttttgtgagataaatgttttgcctgtatttttcttctagcctgttgctttcctttttggttttataataatatgctttgaagagcagggttttttttttaatttgatgaagtccaatttattttttttcttttacaatttgagggttttgtgtcctatttaggaaaaatttgccaaagccaagggcagtaacgttttctcctagggtttctttcagaagttttatgtttttaactctaatgataggtctataatctattttgagttaatttttatataagttgtgaggtaagaatcaaagttcatttttggtacatgaatatgcaactgtccagatgatttgttgaaagattatcccttccttattgtcttgcattaaatttagatattatcatcttctctgttcttctcacatgatcatacagaacactcaatgagaaatatataagcatgctctgaaaagtgagaagctaacagaaacctaagtcactaccttgattagttctgaataggtccctgatagataagtaacagaaaaaatattaggccaggagttggggaacctgtgtgactcgctcttttattagccttcaaactgctttgtaagttgtgaaatggtaaagaaatggaagatattgtctttatacctaaaaattcctatactacataataaaggccattcttgcttggcatgatggtacagggccataaatatgaccatgcaagttgaaaccatgcgaaaggacctttgttgttgttgttgttgttgagacggagtcttgctctgtcgcccggggctggagtgcagtggcgctatctcagctcggctcactgcaagctctgcctcctgagttcacgccattctcctgcctcagcctcctgagtagctgggactacaggggcctccaccacgcccagctaatttttttgtatttttagtagagacagggtttcaccgtgttagccaggatggtcttgatctcctgacctcctgatctgcccgcctcggcctcccaaagtgctgggattacaggcatgagccaccgcgcccagtcacaaaaggatcttagtaatcaataggaaatattattcttgtttcatggctcttaacattttttgtgaaatcattaaaaactcacttattgctggctatacatatatagagaagcaaaaaatagcaagactaatatttagaacattgtaatttaaaacattagaaatattgggaattaaagcatttaatttgttaaaaaaaaaaaaaaaaacttacccagagtagtttgaacagtgtttgcctcttctttttgttgtataacttacaatacagagtgagcattttttctatgtctaggctaacttccaagtctggatcagtttccaccttttatccttggcacttatattgctgtgaaatagctccaaagtttctttaatgtcaagttttctaccatcattgcttcccctaggttgcctttatccttttcctcacaagcactttggtcattcatgtcggtaagttccccttccacaggtgccttaggctgcagctctagggtcttttgagcagtagcagtgtcagcatgtccctggtcagctagttcttctataactccattcaaatttcatttccaacattatcactttttatccctttattgcagtttcatctctctcagccaaatctctctcttgattatacattttggtaaaaggtcataggggtttaccattgagagacaaggagacaatacaatcacatgctttgctgtgtgtgaactgaataagaggctcacagttacctatcactgacatattttgaaagaagtaacatttattagtcactggtcatgatgcacatctgttatttacatagggacttgtggactaaagtgccagcaaagatgcttactactttaggcaattacttgcagtgaatatattgtggtaactaaaatgtgaattgtactgtgggactggtgttatttagctaaacacagtaactgatatttgagcatattggggccatgcaaagtgaaggttccctatatttgcagtgttcaaaggtgtgtgaattcatctatttagtgttctcagcatttgaagacgacaaataaattacttctttagctttcttaatatgagtcttcaggaaccttttctataaagtcaagaaatgtgtgattaaaaaaaccacagagctttctatgatggccacttaagttggctgagtttcagattagattacactgcgttatgaggtagatataccaatgggcctttaaaaagaatatggttgaattatagtttcttttcttttatgaaaagccaaaagttttacataacttcccttactttaatgatttaacattatttttattatctttgaatttcttagttgtaactcttttgatatccagaataaaaacttcaagtcagatcaaatattatgtgtaccttctattgtaaaatgagcttcttacaatcccgagaggctaatttttaaggcatgtttgcttttagtctccttgagggcaaactgcacatgcagaaatagaaattataaaatttggacctttgacattttggagaagcaacaaattattagtattatttattaaaatgtctaatcatggttcattattctgatttcagaagtattcatcaatgcacttctccacactctccccacagaagataacagaatagcttattttaaccatgttggatatgtacttgttttttatcatcataaagttagtttcaattctaataaaccaactaaacatgaaggtatttatctagtgaccgcagtcactgtgttccactctggtttttataataactatctcaagtctagtaggagaaacaaaagtgaaaataattaaaatatggtttggtagaaggggagagtggttacaagatgctgtgagactactggaaaaacaccaaacctagctttgaggaaaataagaaaagcctattggagctggttaagaaagatagcaggaactgcctcagcaaagaagggatgagtagttctttcaagaactgcaggttaagaggcataaaaaccaacaaataagaaaagaattatgaattctagataccaaaagaagttttgtgggagagctaaggctagagaggcaaacaggtgaaattcttaggccatgttaaacaactgtaccatgatagtaacaaagagccaagaaagagctttaaaagaagagctacatgttctgacttgcattttaagaaaatctcagtagcttttgtgaatgatcagaaagggaggcagtaaagaagaacgtaaccagctgagaggtaaaatgggctcagtctaagtcagcagcagtgggaactgagagatgggggaggactccagaggtattatggaggtagaatcaactgactccctgttttctggtttgaacttggtgattacataagatatagaatataagaagagggtcaagttggaggaagtaaaatagtaaatttagttttgaaaaactttgactttgaaaggaatgtgagttatggaatgagatatcctgcctaagattaaaattgcattgctgtgttttgattctgctctttgaatggcctgagatggataactcctaagagtaactgagtgaggaggacagaaggtgccactaccctcccatccaacacagggaagcaatgttaaggctctgtggagacaatcaaaaggcagcctcctgttggagagcagattaacagctttattgtccaggatgaaggatgcaaatagctcttttttcgcgtgtctaaacaaaatagccagagaaggtggttaaggcttcgggtaccaaaagtggtgtatgactcagactattggattttatgttttggaaggctcatgctctgagaagcagcaatatatgagaacaaggctgaaggactgctgtaaaggaccctgtaacagtggctgaaggatgtaccagaaaacagaggacctgactctctcatatgtagcacatatcttagaatatgcccagatcacccagtgctatgtaccagaaccctttatcatggtcacaggccaaaatgtctcatacaaaaagccatacagtgccctttgcactttttctaaatgtaaacaggaaaataatcaaaactatttttagcttacatggaagaatatctcggtatctatttttttctctgttgcttggttgattcccagagttgaactcaccaggcagattcttaagttctaaagcctttaaaaggttaaaaatgaataaataaataaataataaattgtgtatttactataaccaataaaaaagaaaaaaatatgcctttgtttagtgctcatgatccttaaatccctatatgacatgacctgctatttaatgtgttgtatgataagtgaagctagatcctcatttaaaaagtgctatataaaatatctcaagtttcacatgccaatcaatgagttggttaataagaaaatgttaaactttctggagatactttccacttgaacttcattttgttcttctttcataaaaaaggaaatacaagctattcatttctcagaacctacccacagatctatcattttataaataaaaataacaacataacaacaacaaaaacatataaacaaaaaatatatacaaacagtctcacaatttacccttcccctttgaagaaattatagttaggaccctaagaatccttcctttcaaaaaatttctttaccaagtgtgaattcaacaaacacttattacgcatttagtaggtatctggccttgtttcagacactggaatacagggatgaattggataatggcctcatccttaaggagtgaacagagtagttagaggacatgtaatcaaataccatgtgaccaatgtacggagacagtagtataaatgacagcactagattgcacctaaaagtcaagaagaaaagctcctcaaagggaaatagcccttgaactgggccttagtgagtcactggaagttagcatatgaaaaacagtgtgtacttagaaggaaagaggagagaaggtgaaggggtggaaataatggaggcatacatgtccctttgggaaactgtgactaatacggtaataagagcacaaagcacatgatctagtccaacaacagactaaaactataaaatatcttgtttcatatataaatgaaattaggaggtagctagtcatactttattagaatatttgtggagaaagcctgaaaatctatacattttcaaagctcttgggtaactcttgtgtagccaacctagcaaccgctgccatggggaacaaggagcctgtgaaggttttaagtagtacaataaaatgatcaagtctttctgaaaatcaattttaaaattaatctggaaaaaattctgtaggaagaatgagaaaaaattcatttatgaatgaataatgatggcagatgagtctcattagatgttaaaagataatatgaagctatgctaattaacagaacaataccaataaaggaataagaaaatcagtagaaaaagtccaagaataaattaaaatatatgtaaggctctagtatatgataaaagtggcattttacctcactcaagagaaattccaggagagtcttgggacaactggatagttatataatgctgagtccctatcaaacatcttataccaaattaaattctagctgcatcaaagatttaaatgcttaaaaatcataaaggtactagaaaaaaacatgaagtaattattacaatcctagagtaaaagaagcattcctaaagagcacagaaagccccaaacccagaagccccaaaagcaaagattgccatatttgaccactaaaaatcagctatttcttcatggtaaataggcatgtgtgtgcacatgcatgtgcacctgtgtgtaacacaaacaacagcagaaaaaatactacgtgtaagacacacaaaggcataattttttccttaaagagttagtaatcggccaggcgcggtggctcacgcctgtaatcccagcactttgggaggccaaggtgggctgatcaccttaggtcaggagtttgagagcagccctggccaacatggtgaaaccctgtctctactaaaaatacaaaaattagccaggtatggtggcaggcacctgtaatcccagctactcgggaggctgaggcaggagaatcgcttgaacctgggaggcggaggttgcagtgagccgagatcgcaccactgcactccagcctgggggacaagagcaagactcatctcaaaaaaaaaaagagtaaccaataagaaaaaaaaaaaaaggaaaatggggcaaagaattgaaactagcagttcactgaaaatataaaaggcttaaaaacatatggaaagatattcttttgttctcaaataaataccaattaagtaatcaataagaaataatttgtcatttaagagatgagaaaagatccaaaaaattgatagcccaaaatattaatattgtctttctaggaatttgttcaaaaaatatttaaatatatgcatacagtatatgaagagagatgaccgctgttcataatagcaaagactagaacaacctaaatgtccaaatgttccatggtagttaattatatggataagtaccctaatttcagaaattaaatattaaataaattaaggtacttatccatataattaccatgcaacacttaaaaaaatgagatactgctatacatgctgataatatacttggaaattgtatctaggaggaaaacaaatttaaggatgtaaagtgcattccaacaaatttttttaaaagtttgcatgacaaaatgacaaaatgaatagtgtaaaggggccctagaaagtcttgagagaaagagagagactttctattttatatccttttatgctatttggctttttttttaaccacgtacatctattactttaaaatatatataacatttaaaagtaaaaacaatgtactaaaaccaaataaagaaagaaaagaaaagaaaccctctggcaatgatataaaaaaagaaatcacatatagactttcgttaagaaaatatttaccataaattcctgcatgatatcatacgctgctgttttttcctcaaggattttcaaacaatccttgatggctgtctgctcatgaaaattgaatattaatggccgaatctgagccaactgatctagttctccttcagaaacaattttgcgcgtatctaaggaagagaaaaattcacatatgtaagttactggtatatatgtgaagggagattttatttttgtttctgtttctcttaaagacacagccatttaagggtaaacagaagtttatttttccacgggtgaagagtctactactttgaaagaggcttcctttggaaaaatcatggctatttacaccttgaaattatacaaaatccactgcccttggagaaaactgttcagtgccataaacataacgaatgctgtggattgagaagtgttcagttttataatgtgaattgggtatatggattgaaaattatgccaaggcaagaacgtacaaggcttggattaggaaagagaacttttgccctccctgggaccaagtgtttggaagttcctagagtctgagatgtggtgatgtggagagttcacgtcctgtttcattactctgaaacagattgaacatgaacgcacacacgtgcacacacaccaaggatggagaggatctatgcaatataattaataagatggaataatggatacatatggacacttgcaaccaataattggggagaacattctattaatatttaatagcacacatacaatctttttatttttaattatgatcttttaggtaatgttgacagtcaaggttccaaacatctgaaattttatacattatgtccactggccaaaatgcaataaatctagaagtcaacagtaaaagagtattttaaaagcttcaaaattttgaggtaagatgttcaagtaaaacaagttctcataatctctttgcaaagccaaataatgtgaacaataatcaagttaataccagcaaaaagatatatacaaaacaatatagcaaaagaaagaggtggaaatttctaagaatctgcacattcctgggaagcacatcttatcttggtactccactatatccagaggctctttgtagggttggaagtgagggctcttggttgggatagacaggcacagaaatcctaaaatttctcacaaatatccctaaccttagtatgagaggaggtctaagcaggctggaaggggagataaaattcccacaagcgtagaagccattttgatcatctttgatgcccaacagaaaaacccttagatcttcccattgtgttccacctttgctagtacaaaagctgggagaatgaagagagaaaaaaatgaaaatgtagaatgactgtaacaaacactggtgttgactccccaacaccgattctacccctctggttagttaaagccatttgtgatcattccatagtaagatccttccagtgaataattcagaaataggtaggagatttgcgccaaccatagaaataggctggtcttgtaaaaaagagaagcaaacctctcttctaccctcatccctctgtacacacataaacaaagaagtataaggacctaattatcatagtctgccctcttatggccataaaaggaaagagtatagcaaatgtgaaaaacataaagaaactatgttcttgatgacattagcaactgatcatattgaacctggaatccttcctatctctgggcttccattatggtagaaaatatatatatatctttatcattaacatcattctgaatttggtctctttttcttgtagcctggtccaagaattccaatcaaagtataaaggtgaggtttcagctgtagatcctgggaatcatttcagccagtttacagaaagggatttgatctagctatttggtgttgtatcaccattgtgtgggcttgaagaacagatgcttctctcattatgatccaagaacaacactgcataatggtctgccaagaaaagttctgtctttgccacaattaggaaactgaggaagttggagaccattttttctagccactggctcctagatgacaccacttcagcaacaatggagaaataagaaagtcactaccacaactgttggctctagtaacacatcaccttacctataatgaggaccaggaacgccaagcctgctatgatgcatagcaataaaatggatgcctctctacacatttacatcttggctaagtgcatatgatcggcaaagcccaaataagctaccaggaagtcttgaaaatgtaatttttcatttttctgcctgggccatacaggaaggtacactaggagaagggtgtgactgatattgagtaagggcatctgtgatatctgcttaacatttcagccacaccatgccctttgagtatcctgctccttggcccctatcccttcagcacacttatcattgtcctcgggcaaaataaacaatgcagccctccaaaatacagtttacaagggaagatgatgagatccaaataaaaatggaaatcaggaagaattcattcctgctcaatcaacaaaaccgaagagacagaaaaagctatacgtgttcataacaaaatggaataaaatgtgaaacacagaaaaaataataatataatatagcatgcagaataatttttaaaatctattctaaaatggaagataagcttaaaaaggaaaatgaactgtgtatgcaacatctgtcgaaagaaaaagaaaaattattttaaataacagttcacaaggagataagaaaacaatagaatgaggtttaaaaaaattagtttataaacctaagaaaataaaggtaaaactcaaaagtacataattacagcaataatttataattaaatcgaattctgcaagaaacaaagcagacagttgaaaatcaacttattgccataggacaaaggcatgtatacatacagtaatgaagacaagaaaggtttaaaaacaaacagtgaaaagataatgcatgtgaggacctcatcagaggctcaggagaaaagctgcagacagggtgaggaacttgagaaatcctcctttgtggggcaagcttgggaaggggaaaaacagcatccacaggaatggcacaaagcatgcccaaaatgcttttccctatttccctaatggaccaaaagcataagaacctgagaaaacgcatgaaactctgtcatcctcaaggcacaaatgaagactcattaacattgggggtagggaagagagaagagcatcctggacccaggccataagatattccctacacctgcagaatggacaaaataacaaaggaggtaccgcctgaggccttcctaagactgagactgaacaaggacagcagagaatgtcaccccaaccaggttggcaagcaaggtaatcataagtaagagctctctactgctgggaattagagaagatcatggagaagaccttctctgaggtgcatgtacaatgggaagagctaaagcagagggtggagtaaacactgaggcaaatcctctacatgtaaggtaacactggaggaatttgaagctggtggtgcactaagggtaaccatagcaacatcaaacccaagccctgctgcattactgagtaaattgatgcaactcctcacactgaaggcctaccaacaaaagagtcatgtccatccctatttacctcagcgtctagaacttagctaagaaatactacaatagctcccccttagctgcaggggatatgttccaagacccccagtggatgcatgaaactctggatagtattgaacctgatcgtcatcaactgaaacatatttttgttcatgtcttccacccataaatttaatgccttttccatcttaagtaagcatgtatcatgcactgtggccataactttggcactctgatgtgcaacagcaaaacttggatagaagattcattcttaccataggtctacgcaactttagcatatgatttttttctttccttattaagtcaagaactttcaccttttcatgtaaagaaagcactttacagcttccctttggcatattcaaattgccagcatcactactctttggggccattactaagtaaaataagggttacttgaacacaagcactgtgaggccaaaacagtagatctgataaccaagatgactactagttgactaagagacaggtagcacatagggcatgaatatgctggacaaaggaatgattcactcccaggcaggacagagcaggacagtgtgaggtttcatcacactactcagaacagtgtgcaatttaaaacttattgtttatatctggaattgtccacttaacatttttagtctgtggttgactgcaggtaactgaaactatgaagagtgaaaccatggataagacatttttacttctatctctagactatacaatattcagttttcaaccaaaaaattatagagtacacacagaagtaagaaaaagagaaaaaagttgccaagagacaaagcaatcaacagaaccagacagagatataacatatgttaaaactgtcaagtgatgaatttaaaatagtgataatcaatgtgtgaaaaggcagtgggaaaagtagacaatatacatgaacaaatggagaatttcaatggagagatggaagccataaaaataataaagtggaaatgcttaaagtaaaaaaaatattgtaagaaattaagcatgttattgataagctcatcagtagatttcacagaggcaagaaaagaattcatgaattacaaaatagatcaagaggaattatctgaattagaacacagagaaaaaaggtagatgaggggcagaggcagagaagaagagaccatccaagaactacaaaccaatatcaaacagactaatatattatacctgtaaatggaatcccaaaatagaagagaaggagaattgggcagaagaaatatttgaaaagataataactgagaattttttccaaaatgaatgaaagacaccaagcctcagatccaaaagctcatcaaaaacaatataagccagaagacaattgagtgacaactttaatgtaatcaaagaaaaaatcaaaataaagaaattaagatttcagtaaatacatgactaattataaaagctagtattcttgtaacaataatgtgtaacttcactttttcttttctacatgatttaagagatgactttttcctaaatttattagcctaaaaataaaaaaattatcataactttagattgtaaatcaacattttgttttctacatgagaaactaaagcattaaaaacattattttatgttttggaacacataatatataaaaatgtaattttgtgacaacaaatgaaagagatggggtcaaaactgtcaaaggtccacagtttttttttttttgtattttactgaattaggctggcataaattcaaattagagtgataagtttaggatgttaaatataatgcccatggtaaccacaaagaaaatagctaaaaacaatacataaaggaaattttttaagaatttaaatatttcattacaaaaggcaactaaatacaaaaggagacagtaaggcaaaaaaaaatgaggaacaaaaaagctacaagaaatatttttttaaaatagcaaaatgacagaagtctctccttatcagtaattactttagatataaatgaattaaactcaccaattgaaagaaagattggcagaatggattaaaaaataaaaacatgatccaactatacactgtctacaaaggactcactttagatccaaagacacgaataggttaaaagtaaaagaaatattccatgcaaacaggaaccaaaacagagcatgaatagctatattaatatcagataaaatcgattttaattttaaaaagttaaaaatgacaaagaaggacattatatatcataaaaggttcaatacagcaagaacatataacagttataaacatttacacgcctagtaacaatcaaaatacacaaagcaaaaattgacagaaatgaagagagaaacagttttacaataataattgaagatttcaatatcccattttcattagtggatagaacaattagacagaagtaagaaaagggaggacttgaacaatataataaacaaagtatatctaacagatacatacagaatcctctgtgcaacaacagaccacatatttaagaacacatggaatattttgcatgtgttaggctataaactaagtatcagtcaattttaaaacactggtatcacaaagagtatcttctcaaaatacaagagataaagttagaaatcaaatataagaaaaactgataaacttacagatttgtgaaaattgaacgacataattttaaaacaccaatggatcaaagaaggaattacaagggaaattagaaacatttagaaatgagtgaaaacataacacaacatatcaaaactatgggacacagcaaaagcagggttaagggggaaatttatagctataaatgcttacatgaaagaaacaaggcctcgaataaacaaactagctttacaacgtaaggaattacaaaaagaagaacaaactaaacctaaagctaacaaaaggaagaaaatagtaaagattagagcagagatcaaaatataaaatataaaaaagagaaaaatcaatgaaaccaaaagcaagttcttcaaaaatatcaacaaaatgatgtgatgaacctttaattagataaactaagataaaaagagaaaagactcaaactactaaaatcagaaataaaaatgaggacattactaccaattctaaagaaataaaaaagattataagggagtactatgagcaattgtatgcagaaaaactggataacctcaatgaaatagacaaatttatagaaacacaaaacctaccaaaaccaaaccacaaagaaacagaaaatctgaacagacctatgactagtaaggtgattgaataagttatcaaaactatcccaaaaaagtaagccctggatccaatgccttcactgttaaattctatcaaacatttaaaggagaactaacaccaatacttgtcaaactgtttaaaaaaattaaagagtagggaacactccctaacttaatctatgaggccagcattatcccaatatcaaagccagacaattatcctacatgaaaagaaaactaaaggccaatatccatcttaaacattgatgtaaaaatcctcaacaaaatagtagcaaagcaaatatttagcggcatattaaaaagatcatacaccatgactatgtgggatttattactggaatgcaaagatgacttaacatacaaaaatcaaggtaatacaatacgctaacagaaaaaaaggcatgcttatctcagttgatgcagagagagtatttgacaaaattcaacatcctttcaagaatatattctttttgagacagagtttcactgttgcgcaggctgaagtacagtggtgtgatcccagatcactgcaacctctgcctcctgggttcaagtgactctcctgctctgcctcagcctcagcctcccaagtagctgggattacaggcaactgctaccacgtctggctaatttttgtactttttctttagtagagacatgttgcctagggtggtcgtgaactccccaacctcaggtgatctgcctgccttggcctcccaaagtgctgagattactggcatgagccaccatgcctggcctatttgtttgtagaaaaaaaattcaacaaactaggaacataagaaaaatacataaacataataaaagttatgtatggaaaacccacagcaaatatactcaatgttgaaagagtaaaagcttttcccctaagatcagaaacaaggcacggatgccacttttgccacttctatttgacataatattggaagtcctagtcagagaaattaggaaaaaaaagaaataaaagccatccaaactggggaaagcaaaaagtaaacatctctgtttgccaatgatatgatattatatgtagaaaatcctaaagattactggattttacacacacatattcacacacacacagagttaaaaaaaataaattcagtaaagtagcaggatacaaagtcacacacaaaaatcagttgcatttatatacactcagatgaacaatctgaaaatgaaattaagaaaacaatttcatttacaataatatataaaaagaaataaaatactttgaaattaacttagccaagaaggggaagggaaagatttgtacaaagagacctataaaacattgctgaaaaaagaattaaacaaatatatctcatgttcatggtttggaagatttaatatcattaagatatcagtactacccaaaacgatctacagattcaatgtaatccttatcaaaatcccaatgactccttctgcagaaatagaaaaactcatcctaaaattcatatggaatttcaaaggaccccaaatagctaaaacaatcctgaaaaatatggggaaaaaagactcacacttcttgatttcaaaacttactacaatactacagtaatcaaaacagtctggtacaggcatagacagacatataggccaaaggaatagaagaaagagtccagaaataaaacccaaattattttcaaaaaagttgtcaaggccatttaatgggaaaaacacagtctttacaacaaatggtgctgggaagctggatatccacatgcaaaataataaaattggatctttaccgaacgccatatacaaaaattaacttgaaatggatccattacctaaatgtaaaagctaaaactataaaactcttacaagaaagcatggcaataacttcaagacattggatctggcaatgattccaaaggtacaaacaaattttaaaaaatataattaataatactgaaatatacacttaaaatggataagatagtaaatgttatgttatgtaagatttacaacaataaaaataatttggagaaaatacctctaagtaacccacagatcaaaggggaagtcataagagaaatagggagacattttgttaaaaatgtgtagattgtattttttagaaaagttttacatgaaaaaaaaatgagcacttagaattcccatatatcccctgccaaagtttcacttattattaatgttttacatttggatggtacattcattagtattgaaccaatattgatacatttttgttaactaaagtccatcctgtattttggttttcttagatttccttaatatctttttactgtttcaggagcccatctaggataaaacattacatttagttgtcaagtctccttgggcaacttttggctatgatggcttctcagattttccttgtttttgatgaccttgataggtttgaagagtactggccaggtgtattcttcaatgccttactattgaaatttgtctaattttttctcatgattaagactggggttatgggttttcaggaataagatcacagaggtagagtgccatatttatccatagtatcaagggtatattatatcaacatgatgtatgacagttgatggtgaccttgatcacatggctgcagtagtgtttattaggtttctctactatgcagttattctttgtactcctctggccatactgtactctttgaaagaaagtcaatatgtgcaacccacacttaagaggtgggaaattatgatccacttcctttaaaattgaatattaacgtaatttatcaggaattcttctgcatgggagatttgtctcttcttccccatttattaacatatttaatcatttatttatatcagtatgaactcatggatgatgattttatacttcatactataatccactgctacattagattgttgttcaaattgttccaccttttgctacttagaatgagaaaacattataaattgaatgaaaataaaaacacctcaaaatgtgtgggatgcaactaaagcagtacttacaggaagatttgttgtattaaatacttgtactactgttgtccctctgtatttgcaaggaattggttccaggacctcccacagataccaaaatcctcagatgctcaagtcctttacacaaaatagcatagtatttgcatataatctaagcacaccctctctctcaaatactttaaatcatatctagattacttataatacctaatacaacataaatgccatgtaaatagttgttatatttttaaaatttgtaattttttgttgttgtattgttatctttgttcctaaaatatctttgatccatagttggttgaatttgtagatgcagaatctacagataaggagggccagttgtatttatgaaaaagaaatatatcaataatctaagtttccaccttaataaattaagaaaagataaaataaaatccaaagcaagaaggaaaaaggaaataataaagagcagaaatcaatgaaattgaaatcaatgagaaagtaagggaaactaaaagctagttcttggaaaatatcaatagaattgatacagtctctagccaaactgatcaagaaacacagaacaaagacacattttatgaaattgaaaaaaaagagaggtgatcagttaagataagacatcaaaaagttaatgagggaatattacaaacaactctagtcccataagttagacaatttacatgaatgggacaaattcactgaaaaatacaaactgccaaagctcattaaaaaaaagagagacacctaaatagtcctatatcaattaaataaattgaatattgttatgggctgaattgtggcccatatgtggccgtatttggagatagggtttataaagaggtgattaagttaaaatgaagtcattagaatagcccttaacgtaatataactgatatccttataagaagagattaagacacagatatacacagtgggaagaccatgtgaagacacagaggaaagacggccatctgcaagtcaaggagagaggcctcagaagaaatcaactttgctgacatcttgatgtttgactgctagcccacagaactgtaagatccattcttggatattttgttataaaagcacccccccccaaaaaaaaaaaaaaactaaaaactaacacaaatatgtatttagaaacctcacaaattctgggtccagttggcctcactggtgaattttagcaaacatttaaggaagcaatactaccaattttatacaaacttttccagaatattgaagaggagaaaacacttcccaaataattttataagggaagcattgctctgatactaaaaccggaaaaagatatcacaaaaaaagaaaattacagatgaatatctgtcatgaacataaacacaaaaaaagtcttcaggaaaatactagcaaatcaaatcgtaaaacataaaaacaatattacaccatcacaaagttgggcttatcccaggaatgcaaagcaggtgagatatttggaaatcaaccaaagtaactcacggtatatcaacaggcaaaaaaaagaaaaactatatgatgatctgaatagacgcagaaaaagcatttaacaaaagtaagagtccattcataataactccgggaaactaggataataggaaggctcccttaatctgataaatggcattcacaaaaatactacagcgaacattatactttatgatgaaaaacagaatgctttctccctaaaatggagaatctggaaaggatgtccactccctttcctcttattcaacattgaaccaaaagtcctagcgaatgcaataagttagtaagtcaaaaaaaaagaaagaaagaaagaaagaaagaaagaaagaaagaaagaaagaaagaaagaaagaaagaaaagaaatgaaaggcatatacattggaaaagtagaaaaataaaactgtgtttattcaccaacatgagtatctacttaaaaaaattccaaaaaatatatttaaaaggccctagaattaatgagcatttaggaaggttgaaggacacattggtaatatacaaaaatcaatcatatttctatctactatcaatgaacaatagaagttaaaatatttttcataagtctcatttacaatagcaccaaaacatgtgaaatattagatataaatctaacaaaacatatatacaatctatatgttaagactgcaaaacaaacaaacactgatgaaagaaatcaatgcagacctaaacagagtgaggaatgcttccgtcaggagaaacaacaacaaatccgttaaagtggaatttgagaacgccaccaggacattttgggttcctcatatgctactgaatcatcagggaaagggggattactacactgcctagtgtgctggattccaagtattaaggggaaactgggctgctgctttccaatggagtaacgaggaatacgtctgcaatgcaggtgatcctctagggtgtgtcaaggtgattaagtaaacagaaaactagaaccacccaatttaggcagaactactaatgacttagatcttgaggaatgaatgtgtgggtcaccctatcagacaaggaaccacaaccaaatgggatgtttgctgagctgaaagagaataccagacaggtgtaagacggcagtgatcaaaatcagatacaaccatgtgaccagctgcataaacagggataaaatattgtgaatttttctttcttttttgatatgcatattttatacatatatatatatcatatttttgttttcttttaaaaatattaaagggaatgtgaatcagttggaaaagaaagaatatcactcaagacaaaaaagagacacttttggagaaggggagagaatgttttcagttgtacacagattagttttatcactgtagatgcaagcataaggttgtccttatttggatattaagtaacatttaaaagggtgtatataggtgccaggctgatacagggtgaactgtgatagctttataatatgttgacatggctaggctggaccacttttcccagaattctgttctctgaatgtttccagctaaaacagggcacaagcgaggttctcatgtcagatctggaaggtgaacatggggcagcagctattctgtgctcagatgcactatggatgatctcctgactcccctcattctatatgtggaaggaagaacttaaaatcacaacagtgccaatcctacctgaatgaatataactggcatgtcattctatctaaatttcaaacaagtttacacaggaatgaacaaaataatttaaaatcaccgatgcagcaaaaacttgcccaaatagctacaaaaatgtattttttaaaaaattagagggaggattttcctttccagatatatttagaataagtagaatcaaaacagaataatataatatgtccacaggaacaaacaagtcagttagtgaaaaaaaatttagagaatacaaaaggatcaaacatttttggaaacttaatatgtgataaaagtatatataaattcatttgggaaatgtggtttacttagtgaatagtgctggtataactgtccagtcatatgaaagaaaatatagttttctatacccctataatatttagcaataaactgcagatagattcgtgatctaagcaaaataagtgaataaaaattctgaagaaaatttaggagaatatttgcatgtttttcctgtaaagaagacctttttaaacattttagaaattaagaatgttcatgaaagtctcccttcttaaggtatagaattgagggttacaatttatagcacatttgtcagacagacaacatgttaagatttccaacatgtgaagagttcctacaaattaataagaaaaacaatgaacaaagtttataaatatgcaaatccaagaagaagttaataaacatatattaagatacttgatcctagctgggcacagtggctcacgcctgtaatcccagcactttgggagaccaagacgggtggatcacaatgtcaggagttcgagaccagcctgaccaacatggggaaacctggactctattaaaaatacaaaaattagccgggcatggtggctaagcttttggaaaggaatctggtattgcccattaaaatataaaacgaacataaactttgacttaactatcttactttagggaatctaaccaaaatcaaagtaccagtacttaggaaatacatgtaaatatatatactgcagaaaaagtcaactggagaatgggtgaatatattatggtatttccatacaatgaaatattagacaactattaatcctatgtcagaatatgtcttaacctatataataatatagtttaaattttaaaaactatggttgcagggtaattgtagagttgcagagcacacatcaatttttatttaaactttaaacagaaaatctgtttttatatctttgtgtattcttagataaactattatattggttgcctctgaaccaggattcaggatgatgggaggaaattattaactttttctctatatcattctatattgattttcactaaaatattagcatacattaactttataatttaattttttaaaattttggcttttaaaatattttattaaatgttaaataggtacaaaataataattaagtaaaatatctttaagaacaatacatacccaatttaaaacagaacattagcccctgatgctcctgtgtccccttcccagacctcattccttgtcctcctccctcagggaataatcactattctgaattgtactatcattccttttgtttgttttgtttaccctttatgctgttttgcatatttcacaaatttatatagattacattattttgttttaaatcttgacttttttgctaagactgcatctgggtttattcatcttcacattaaacaaaatacaatatctaattcatacatgctggtgttgacagatatctgagttgtttacagttgaagtctattaaaaacaagcctagtatggacattcttgcatatgtcttctggtagaaaaaggaaagagtttctctaagctaaataaccaggaaggaaattgctaggacatatggcatgtgcacactaaaaaaataccaaattattttccaaaatggtttccatcaagccacatactcaccaatatcaactattatcacatttttaaaaatggaaacaatctagtcagtgtaaattattatttcactatgatttaattttcacttccctgattcgaaattaggttggaccactttttcatattttctcttctgtgaaatgtttgttaatgtgttttgcccatttttctatttggttatcttttacttactaatatgcagtttcttatattttctaggcattaatcctttgtgagcatagacctcagtaacagaccctaggaggagcctaaccatagtcctaaactgaaactgaaaaggagggtactaagaaagaaaaaagcagtgtctatctacttttccctaggaactggccttactctaacagctaagaaatggtatttcctgtttgcaaagtaatgtgttcttatttttattttaaaaatatatttatattcaaaattccacttctgcctaaatatagaaagctagtatgagcatcactcctaccctaacaatatacataagttgaaaaaaaaacactaaatcaaaattttattgaacccattagagagctgaggttgcagggcaaccaagtagtctgcaatctaaggaaagacagactctcctaaggagtgacaggacatgaacactggctccctgtggcagttcaagggagaaagagataccaggcactatacaaatgggaaagaagtattcagacataaaatgtaatgcactgctgatagctggatgtgggccagtgtgacagtacagaacagcgtaaagccacagacacaaaaagaacttgcacacattcacagactcaagttcacagacctccaacaggtgctcataagaaagactgagagcagagcaggaaacgggaagaaccattccctcagaagggtaggcttggaggaggggagccactgtcatggtcgaaaatgcgtaaagccccacttagacctatttctcccagaacaaaagccttacactgcaggaggaggagcagcaatccctgctttgtataagtgtatacccactgcagttggaaacagagcaaacaaaatccatctattcctggagaaggtgcagaaaacagtcctaagcccaggatttaatgccattattattacaaaactcctaccactacactaagtgaaggggaggaaaccttctccactgtagacttgccaaaggtgtcaggcagagtctggatgccatgagaaggggtagtatcactaaccaagcctgtcactgaggaccagggacagaggacctgcccaaggctgagaatggaataggacaacaaagaatgacttggccctccctccccaggcacgcaagcaccagtctactgctggaagataggcaggagaaggaaagaaagcccttctaaagcacaggcacacaggggaggcctaaagctgaggacgaaacaggaagagaccaaaaataaaaactccttagcaccccagctgacaccctgcgcacaagctaaatcctaaggaattctaagccaatggttcaccataggtaatgagagcaacacaaaaccaaaacccagctcatgtcctaaatggcctaccagaggaataggcatgactatttctaggcataaattctatttactttagtctctttttttctacacccagtaccaacactcaatcagatatatagacacataatgaagctgcagcagctgcaacaacagaagccagtgtcaaaaagcaaagcaatcacagaaaaaaatatcagcaacaacccatctgtcagagttatccaccagggaattttaaataactatcattaacatgttaagctctatgaaaaatgcaaacaaaacgcattaacaacagagacggaatctgtaagaaggtgtcaaatggaaatgttgtacataaaaaacactgtgtgctttcaatgggttcattagtagacttgacacaaccaagaaaggaatcagtaaacttgaagaaaggttgacagaaattacctaactgaaatacaaagagtaagaagagtaggagaaaagaaaagtaaaaagcaacaaataatgttagtacagcttctttggaatacagtttgtctgttatacacttatgacccagcaatcccactcctagatatttaccttaaagtaatggaaacttatgtttacacaaagtttgtgaatatctgtagtacttttatccataattgccaaaatctggaagcaacacagtgtccttcaactggtgaatggaatactattcaataaaaaagaaattaaatactgataaatgcaatgacacagatgaatatcaaaagaattatgctaagtgaaagaagttggactcaaaaggctacatatttatgattccatttatacaataccttgaaaaagacaaaagtaaagagaatgaaaatagattactggttgctaggcaccggtggtagggtaaagggttaactataaaaaaatacaagagaaatttggggggagatagaaatgtactataccttgattgtgatggtaaaccttggtcaaacctcatagaactgtatgctaaaagggtgaattttactgtatgcctcagtttaattaagcatgttttaattaattaaaaattatgtctcgttttataaaagcatattcttataaactatttttgtaggagatctgcattttaataattgcataaggtgatattttcttaactggatttgacatttttcaaataaagtcattagagaagatgtttccaacatttgatgggatgttggttatggatgacctctaagatcctctccaactccaaggtttttgaggtgtgcatgtgatcccccaagtttacaaacacaaattttataaatatatatatatatatatatatacacatacacatatatgttaagtatatattcatagttctaattacatttatattatatatacatgtaaatacgtatacacaaaaagttctgaaatattcttcagtattataatttattatatatttgttattgtctttttttccactataaacatgtgataatttgtaatccaaaaatgttattattttacttacaaagcatatattgtgcaacaaatttttaaaaaggaaataaggaagcaggttatttttcaaatctataaaatacctagctttaaaaaaatggattttactaaactgacatatttaatactttaaaatacttgaagaaaggacaggaattagccattgtgaatatggggtgtggagcatttttttaattgcatttttttatttttaaaagaaaatcctagaaaaccatattttcccatttttgaagttttccctagctctttctttcatttgtattagaaatatctttgtgcatatctctaaaatagagcctcaacttgctactacaaataggatgatgtcataccagaaagtagaggggagagagcctgtgatggccctgcagcctcctcatcctcactgctccacctgtctcttctgaaggggcctctggctgtccacatgctgggatcactgccactagaaaagaaatgtatatatttgcccatggtttcaaagaatatatacatttgagaaatactttctaatcatcttcattgattatttaattgacattcatttccatttcaattcagccacccactcccattgtcatcacctgaaactggcccacttgtgaaataattcccaaatcccaatgtctgatcacaaactccatctcctcctactacttttaccttgcaaactagtcgcctcagatccatccacttatttaccttctcccctcctttacctagactgtgggagggaagtactcgggtcactgggctttctaatatcggcagagagccgtttggaaaataccagcatgtccctggttggtttcctgtaccactcttccatggcagcaaattccaagccaccatcttgttatagtccttattttaatactctctctgacttagtaaaaatgtaacttcttctagaaaatgcaagccagaaaatagaaattctttcaatttattatcttttaaaacatttacttagatgcatcaatgtctttcttattccttgctttctgcctgttcaaaattcctccttccgtgttcttaaccagattccttctgcctcctctaaggtatttttctataacttatttttttttaacatatcgtgaatttctccctatctacaaattctttcatatcataagaatacacaattttctgtatcttaaaaataggaaatgctttaaactctgtctagctactaattgttaacagatttttcaaatcctagcccatacccactttgtttcctttgcaacgtctccatactcaactgactcgctaatgctattaacttggctcttgttgcactttcatttgcaaccctacctagcaaaatcctcctaatttgacttctgcatctaaccttcaatgtttagagaaaattcttcctaaaatacaaacttaattacacctgcccaccaatatcaggataaatcaaggccccttatcagacacaaaagtttaggatattggccaggtggcctctgtctatttttccatcaccatctccactgatttcctacatgcactgtatgctttaaccttagcaaaataagtgcctttttcttttacttctgtaagaaaattcgggtttcttactcttttctccttctaatttttttcttggattactgtaaacatttaattaatctccactgactgccacttccagctatcctcaccttgccaccagcattcctccttctggatggataaatagatagttgcatgaataaaacaaaaagaccctccgtatgcatccttttgattttaacagactgaataaaatgtatactcagcttcacatatatggcattacttccctctccagcccacactgtattttgggctccacctctcatcttctgcagcttcctagcattccacctcacatacaccctacaactcttggcagctaatatttctccccattacccctaagatattttcacaactccttaccctcgctcaaacttctccctcttgcctgaaatgttcttctctttttcacctgctaggtttctatttaattaaatcctaaattcaaccaaaatatcttttcttcaaagaagcttgtgggaaacctccctcatgcatagtcaatcttctgtacccacaatctttggatttttactctaaaataatatttactatgttgtacatcaatttgtcttttatatgtctgtttccctaattaaactgtgaactaaagagcaaaaaatatatagtagtttgtatttgtatacagtgcttagtgtatcacagaatctcaaaatgtctttggaattactattatttgtttaatgcacttctgaaaattgtacatataaatttcatacaatacgcatacaaaaacacataatataaagaatatacacattcttatacagtgctattccagtgagggtagctaatattactgataaatctctaagaaaatatggcttaacaaaatgtttcctcatttgatgtttttgcttataacacctaaatttgaacattttataagcatgaaaacttgtttctttgttttcctaatggaaatttactgttcttcaggtactttaaattttttaaatatatactaccagaaattcaccatactaataaacctgttgtttataccatataattttctttctgaaaacagattacatttctaataacatttagtgctgtaccgtgagcttcatgctacctcaagtacactgaccacttcaaaagctccaagcatatttgcaaaagctttgacgccatgtaactattgagaggagagagaaatcgaatccttcaagaatacttttcccttatgttaattaccatatttttgagatcataaacatatttctaagaaagctaaatcaagtttataaaaagctatatcttgaaaaattaaacatttcagggccattattcactgtctccatgcagagggctagctatgaatataagtagcataaacagaaaacccactaaataagcatattagttatacctttctgaaggctcttcaaaaacatcctcataatcattatgtgggaaattccgaagagaaagttttaccttctctgaattaactttattttcaaaaacctacagacataagaaaggaaacaaattatagcactggttttagaaaaatatggtttaaaacgtgatttctatagctacttaagaagagcaaaaagatctgcaataatggaattataaccacaatcacatagtataatgtctgctcctagaaaatcacttaattgtatatctccctattaaatatcttccaatctgtcaaaacagtgtagagtactatgtaaacagaagttatttatattgaattgctcaagtgatttttcaaaactaaatttttaaaaagcttcatttgagaaaaaatagatttattacttcagcccagaagagattttcttataagtgtttaccatgttttgtttactgtgaatataaaattcctgccactaaatttatctttactttagtacttgcaccatctaatctactaattctaagtatttctccacattccactgcccaattttgcaccgggcagtggacttcagtcttgataactcgcagtgccagtgccccagccaccacatacacgtttccttccttccttgtctaatactgtcttgccatacttggccttctattttctcaagaacatcttttgaatcagctgatcaaatctcattcacacacagaaataactttgggactattattgaaattaagtaatatgaattttttaatttaaattggaaataagtgatgtatttatatattaagtatcattatccactaatatgatatagctatccagcaaaaacattataaaatattctcaataaagacaatgtataccttttcttagatttactcctaaacaccttaagtggcacaattgtaaatgtaatgtcatagagcagaccttttatttgatacacactgctcaatccacaaaccacatgtttttacatctagtatttttgtgtacattccattctaaatactttaaacttccattatgatttcttctttgactaatgagtttgttagtgtttgcttggtgtatgtttaatttttactttaaaatcacaggaaaatgtccacctaagattccttctcattaaactatgtagctacaatacacgaaatgaaatgagcttcacagaattgaactagttttgaaatcagcactgattggcaaatccctaaaaattaatttcaggataattaaaattgaaatgtagaaagtgtggctccagtgggatggaggaaaagaagtgggacacatgctattacacaacatgatcccacttccctcttatgagacatgcttaaaagtcatttgagtacaattcatttacttagaaaaagtgatatctggaagtcctaacacaatttaaacctgagacatctttcagctcatggttcaaaatcaaattgattatatttattttttaaagaagcagactgttccagatggctgcaattcaaatttaaggctgactaacatatgtctgattgagtgaaatgtgattttgctaacaataccaagaactaacaaggagaaatataataaattatcaagatggcaggacttttggagattgctcacggaatcaaattaatatcaaattttttaaatgttagaaaatgttttctgaggagcctaagttagcttttctgtagtccatgcagcaaggatttatgaggacaaagtgaaaacagtaacacagataggagcctggtttctagtctgtgactcaagagttatatgatcatagacaaatcgcttcagctttcacctctaaaatgagtgctggcataaaaatgtctttaacaggccaggtgtagtggcttatgcctataatcccagcactttgggaggccaagacgggtggatcacctgaggccaggagctcaagaccagcctggccaacgtggtgaaaccctgtctctaccaaaaatccaaaaaataaattagcctgtctcaaaaaaaaaatttctttatgctccaaatctaaccaacttcaagtctatgagtctagacaatttctaggggacagcatcatatctgaaaggacataaaaatggctacagtatcaaattgtttcatgaaacataagaaaagcaagttctaataaaatcaggtaattttcccaacactataaaaaccatccaggaatgttctaagatccttttttatgaaaggaaactttaaagcatatcagaattcaccctagataggccaagctataacttagcaaaaaaacaaacaaacaaacaagcaaaaaaaaacccaaagtaaaaatataaacaaaatcacaaaatgtgctcagttctagaagaagtcaaataagactataagactatataaaggatatacttgggccattctgtgaaggtgctccctttcaaatcgtctctgcttcaaagagaaaaccattctgatcagagaaaagaatcaagagtgagcggagagcccaacacggcactaacagccagagattcccagccaaagatgtgatggtagccttgatgtggccaacttaagtatagcagagaatggacaggagataataatcaagttacaacactgttcttaaaagctgcactcctgcccacctggggtggaggtggcaattgaacaggggaagtggtaggagcagtttttggtctatgtactgactttatctctattactcctgtaacttacaggaaatgaacacaaggccagcatcatcatcgcagttccaaagctccagttgactaggtaagagaaaaaaaaatgcaaagcacccaccagactaaaatgcatttccctttttttgtgctctaaccctagcactatctccacaaatggggtaatgtgttgaagtaagagtttttgtcacagacttttcacagccctctacttttccatagttcggagacacccaatcatgctgtctcaaacaatgaaaaagtccacaatcaatacatctaaaggtgcttcatacttcatgtgacatttattttgtatcttcattagtaacacaaaactagtgcctgtaaaatttccagagtagcattagaaaatgcaattcattagaaactttgcaaaaaattccactctttcaaatccccattttggtcactgtcaacactacagtgacaaaaaattaagaaatcattttggtgagaaccaaatagatacccatttcccagagagcatagtcagcaatttaggtattagccaaaattagtagagatccctctccttttagtcttacctttgatctaggtgtgttttcctgacttgatgaaggcaaagtctccctgaaattcaagtcttctgcttcagagtcatttccctcataatcgtttactgaacaaaggcggggggaaaaactgatcaaatagaaaacactatacagaaggaaaaatggagccttaatgagaaaaaacaagctacatgaggggcattttcatctacttttcctgttttccaaacaccccatctttatctcctatggtaatcatctctttctcccctgctttgaaaaaatcaacatagcaaagctgatccttcttctaggattatcctcagggagttgacttttgagcggttcccttgttcctcattgccatattattcaagaaagtactcttcaagtaaatcctagatatttacaacctgcagaacctatgcattgggatctacagaatacagtcttctgtgtttcagagtctatttcttgaataaagaatactgtgttacaaatgtcgcactgtaacttcttgtattatttataattcataagttagtaatatgttaaattatacagaaaattgttttcggctttgttgaataatgtaatatgaatcatcccaaggaaactctgggtttcttatatgattattcctaattactgtgttaattttactgcacagactctttcagataagaagccaagagaaaattttctctgatctcagtactgagcactcagagtactgtttctcataccatgggagccttaaatattatgatttagaaattctatggcatggcatattaccaaatcaataaaaatatagtaaacaagtactatggaaatgaaaaagtgtgttcctgaatgtgtgttaaaaaggaaatctaatagaaattatgaacctttataacacatgaattaattttataaattaaaacattaagaaatatcaatgaagggacaacatatcaaaactaatgtgaagtagctaaatgagtatttagatagagggaaaatgtataggtttaaatgtgtttacaaaaaaggcagaaaaaaaaagctgatataaatgagttttgtattcaatcatagaagccaaagaaaaactgaggaaacccagagaaactacaaaggagaaaatcataaagaaaaatataataacagaaaataagcctaaagaataatcagcaaaatccaataaactagttctttgaaaaaaaaaacttaaaaatacgcaaccctctttcactacaaatcaatggagagtaagtgcacaaataacattaaaaatgaaaaaggatcgcttctcggccttttggctaagatcaagtgtaaaaatgagaaagggcacagctacagatgcaactctcatttttaaaggtaataagcaaatattatgagaaactttagggaaatctgatgaaatggaaacttttataagagaattataagttatacaaatttactccagaagatgtagaaagcctaaatagtgtaataaccatttaaaaagtcaaaccaataatcaaaaatatcactcccaagaggaaaaagcatctgggcccaaacaggtttccagatgggattttatcagactttcaatgaaaaaaatctctcatgcaaacggttctgaaaataggaaattccgcaaacctaggaaggagcttcaagtgctagaaaaaaaattaacaggaaaaaaaagtctatgagaattgtaaacaagcaactcatagaaggcgacttacaggccaataatatattcagaaaaagtccagcctcacctgacaaacaaaaaatgaaaagtaaaacaacctacaattgactttcatttatgcttatgagagatttactgtaataggacttaaccacaaccaaccagaaaataggacaaaatatataaaacaataattttcagaccttaaacaacagactgtgatcccagagagaagggggtgagccttctggttgctccagattatggcctccagaagtttgcaggctatagctcaggaaaggaatcaacgagtccagtgattcaatgagttgagaagaaaaagatcaaagttaggagaggctgaggcagccagaatttgtagggcagagtaccagggaggagggagctatacagaacaagagaagtctaagtagctgcaaagaaaccctctcatgtcctttgcagaatatggatatgcttatatgaaggaggacaatctctgacactcaggaaggaccaccggaaagtagcaagccacacaattcctaggaacagttcatatgagccagaatgaggagaccctgtaatacagggggcgttgaggatagtgcacagaagagatacctcttagtactaaaactatccttggaacagaagctccttagggccacctataaaaaaggtgaagagcaagcctcagacaggatcaggttaaacttcaagtaacataactacaaggcagaaaaacccaacattctttaaagaaaaatcaaggccgggtgtggtggctcacgcctgtaatcccagcactttgggaggctgaagagggtggatcacgaggtcaggagttcgagatcagcctgacaaacatggtgaaaccccatctctactaaaaatacaaaaattagctgggcatggtggtgcgcacctgcaatcccagctactcaggaggctgaggcaggagaatcacttgaacccaggaggcagaaggttgcagtgagccaagattgcaccactgcactccagcctatgagacagagtgagactctgtctaagaaaaaaaaaaaaaaagaaaagaaaaagaaaaaagaagaaaaaaagaaaagaaaaagaaaaaatccagcaccaaaatcatataattcacaatgtgtagtaaacaattaacaggtatgccaaggaatagaaaagtataacccacagccaaatcaatcaatcaatagaaatgtacttagaaatgacagatgataaaatttagaaaaaagaacttttaactattataaatttttaaaaggtgctcaaggaaataaagaaaaacatgatacaataaaaagagatataaatcatgtaaaaataagacctactgaaatttctagagacaatgtatgaactaaaataaattaacagcagataaggcagaaggaaaaaaaatcagtgtctgtcaacatacagcaagagtatatccaaaatgaagcgcacagtagcgaaaaaaagagactgaacagactcagcaaactgggacaacatcaagtgaactaaaattcctgtaactggaatgccaaaacaaatatgaagaaataatagctgaagtgttaccaaactagatgaaaactataaaccaacagaccaaagaaggtcaataaaatacaaatgtaatatatgagcttatagaaaaatcacattcatgtatgtcatattcaaactactgaaaagaaaaaatgccagagaaaacagacacattaaatatagaaaaacaaagataagaatgatggatttctcatcagaaatcatgcatgctagaagataatggtgagacattttaaagtattgaaagaacatagaattcttatagaatgtcaatatagaattctataccctgaaaatatatatttcaaaaaataagacttctgtagaccaataaaaactaagattatatccagcctgcactaaacaacaacaacaaaagttaaaggaagtttttcaggcacaaggaaaaggataaaatatgaaaatgtagaactatccaaaggaatgaagagtggcaaaactggaaaatacatgagcacataaaacatactctttcacatgttctaatttctttaaaagataactcaattataaggaaaaataataatctattgtagggtatacaacactcacaataaaattggtatcaataatagcatgaaaggcaaatgggaggaaatggaagtatcttatgttcctacaactatatgtgaaatggtaaagcagttcccgcttacccacagggaatgcctagttccaagacccccagtggatgccgaaaacttaggatagtacttcctgcactgaagtcttaaatccctcaaagtcatccatgagggttaaaatcagtttttcccaaactcccattaatgttgacattttgacctcctcccataaaccacaaatgttcttaatggcgtctagaatggggagttatttccaaaaggttttcaatttactttgcccagagccatcagaagaatcactatctatggcagctacagccttacaaaatgtttcttaaataatgagacatgaaactcaaaattactcattgatttctaggctatggaatagatactaaatcaggaactaactcagtaatttaaaaaaacctaccaatcagaaagagcccgggccagaaggattcacagtcaaattctaccagatgtataaacaagaggtggtaccaatcctactgaaactatttcaaataattaggaagagggactcctccctatctcattccataaggccagcatcgttctgataccaaaacctggcagaacacatggtctaatatccagaacttataatgaacttataaatgaacaagcaagaatcaaacaaccctgttaaaaaatgggcaaaggacatgaacagacacttttcaaaaggagacatacacatagccaagaagcatatgaaaaaatgctcaatatcactaatcatcagagaaatgcaaatgaaaaccacaatgagataccatcttacacaagccagaaaggctattattaaaaagtaaaaattaaaaaaaaaatgtttgtgaggttacagagaaaagggaacacttatacactgctgatgggaatttaagttcaaccactgtggaatgtggtttggagatttctcaatgaacataaaacagaactaccatttgattcagcaatcacatcactggctatatgaagggatataaattgttccgtcataaagacatatgcacatgtatgttcatcacagaacttttcacaatagcaaagacatggaatcaacctacatgcctgtcaacagtggaatggataaagaaaatgtggtgcaaaaacaccatggactattacacaaccataaaaagaatgaaatcatggctgggtgcggcggctcatgcctgtaatcccagcagtttgggaggccaaggcggatgaattacctgaggtcaggagtttgagaccagcctggccaacatgatgaaaccctgtctctactaaaaatacaaaaattagccgggcatggtggcacacgcctgtaatcccagctactcgggaggctgaggcagaagaattgcttgagcctgggagatggaggttgcagtgagccgagatcgtgccactgcactccacctggctgacagagcgagactctgtctcaaacaaaaacaacaacaacaacaataaaaaaaaaaaaaaaaaaacagaatgaaatcatgtcctttgctgcaacatggatgtagctggaggccattatcttaagtgaatcactacctgggtgatgagatcatttgttcaccaaaccacagcaacaagcaatttgcccatgtaacaaaccttcctatgtacccccaagcctaaaataaaagttggaaagaactagtctacaaaaaagtttgggtagctttccatgtttttgcatattctagcttaactgatttatcattaaaattagctttttcataaaagtttgcaactgttaaaggatagtttccagaaaaagaaaatcacagctctcatacagacatataaatgcacatgttactttattatattcattaatcagtgagggaatcaggcagatgttatttttaaatttttttttaaaaaacccataatactgtgtgttagtctgttagcatcactacgtaggaatgtctaaggctgggtaatttataaagaaaagaggtttgttctggctcgtggttctgcaggctgtacaggaagcatggtgctggtatctgcttctagtatctaacctcaggaggcttatagtcatggcaaaaagtgaatgaggagccagcaaatcacatggtgagagacaaagcaagagagaaggggaggttccagactcctttgaacaatcagatctcacatgaactgagagagcactcactcatcaccagggggataacaccaagccattcacgaaggatctgcccctatgatccaacatctcccaccaggttggggattacctttcaacatgattagaagagataaacatccaaactataccatacaggaagtccttgccagagcaattaggcaagagaaacaaacaaaaggcatccagattgaaaagaaggaacaattaggcaacagaaacaaataaaaggtagccaaattgaaaaggaggaagtcaaatttgtccctgtttagagatgacatgctcttacaaatgcaaaaacctgaagaatccaccaaaaaactcttagaactgataaacaaattaagtaaagttgcaggatacaaaatcaacatgcaaaaatcagtagcatttctataaaacaataacaaactacctgaaaaagaaatcaagtaagcaatctcatttacaataactacaaaaaataatacctaggaataaatttaaccagagattaaagatctctagaataagaactataaaaaattgatgaaataaattgaggaagacacaaaccaatggaaagacatctcatgttcatggaataaaagaataaatatttttaaaatgacaatataaccaaagaatctgagagctcaatgcaattcctatcaaaataccaatgacattcttcagagaaattttaaaatcataaaattcatatggaagtacaaaaaatactccaaatagccaaagcaattctgagccaagaaaaacaaaaacaaaataaaaacaaacaaacaacaacaaaaaaaaaacaagaacaaagcttggggtattacactacctgacttcaaaatacactacaaatctatagtaaccacaaaatcatgatactggtataaaaacagacacatataccagtggaatagaatagagaacccagaaataattccatatgtttatagccaactcttttatgacaaggcacaaagaacatatattggggacaagaaagtctcttctataaatggtcctggaaaaaactggatattcctatgcagaataaacttagactcctatccctcatcttacacataatctgacttacagatggaatccaggctcacaaaagcagatagcagaatggtggtttccagggtatagaggaaggaggaaatggggagttgttggtcagatggtatcaagtaacagttacacaagatgaatacgttctgaagatctgatgtatagcaaaatacatacaatactgtattgtaatgatatttgctaagagggtagatcttatgtttgtaatacacacatacacacaaagaaagaaaatggtaactgtgaggtggtggatatgttagcttaattgtggtaatcatttcacagtatatagacaaatcaaaacatcaagttgcacaccttatgtatacacaatttttgtcaattatacccgataaggattggaaaaacacttctagggagagagcaataataatgacaaggagggcggatagaagagggaatagaagctgggctgaaggtggaaggaatgagaaaaggcataaaagacatactgaaaaatgatggcaagctactaatgttttaagcaagacaatggcaatatgggtcggctgggagacagctgacatttaactaaaacactgcattagtagatgtatcaaaaaccttagaaatgtatatgccctgagttcacagctaacaaaattatggaaacaaacagctttgtggcagattacaggttgtttttattgtcttgttgttttctttgtgttttggtgcttttttgtacttcccaaattcttcacaataaacctatattacatttataatcaggaaaaaaaaatgccatttgaaaagggtaaagtaaaacactagagtttaattgttgttactctaagcgtgatggcttattagaaatgcagagtcttgccccccaccccaccccaccaagacccagaggatcagaatatgcaggataataatccacaggtggtccctatgcaaatctacagtctgagaggcactcctgtagctcctcctgatcccatacccacaaaagtagatgatgcacctaccaggctctgctctaaagtccctaggtgaagacatgttgttcccatcccctaaatgagactggtaaaaggcttcttcagaaaaggagccttagtgtcctgtgagtcaggccaaaggtctagttagtatcctgggggccagcaaacaatttttgttcacctggtaaaacacacaaagccaaagatttttctgttacacaactggagctatcacagctttgacatattattactcatcaattcaaaatatttaaaactgcaattttaattaaagacaaaataaatttcatttgaaattttatcaaataatttcaggatattccttgagaactggagatacgcttatttattcaaataccagagcttaaatatgctataccttgcattccacaaataaatatgtgaatggcccctccactccaatgacgtatctctttatataaacacacacacacacacacacacacacacacaaattcaatcaatgtcactcaatggaaactcagttatttaaacgccacacctaagctaaattaggtgctgagaattcagtactgaataaataagaattaattacagagaccgtcttcaaggagttcttgttcattcaatctataaaaagttctcacacagaataaatcttttttcttttctaattcttgccataaagggcctgtaaggccatgttacattgctcccattggttaaaaccaagaatacttttatctggagacctttccatttactacctgcaaataaaatggtattactataatctgaatctaaagttaatgtgtgaaacagatttattttaaaaactttgagatataggtgttaaaaaattatttaagactaggtgtagtggctcatgcctacaatcctagcactttgggaggccaaggcaggaggatcgcttgagctcaggagtttgagaccagctggggcaattgggtgaaatcctgtctctacaaaaattagacgggtgtggtggcacacacctgtggtcccagctacttgaaaagctgaggtaggagaatggcttgagcctgggaggaggatacagtgagccaagatcatgccactgcagtctagcctgggcaacagagccagaccctgtggcagaaaaaataaaattaaactaaattaaaatgtgaaagtaaggcaaaagataagtggaatgtcacttcaatgtcataaaataatgacaggccatcccaaagattacttatgtggggaaattgtactttattcagttcattgtttactactgattaaaagtcctagacttaatgcaattacaacgtaacctatagatttttgtccagcagtgatacaaataatttctgtctgataaggtaacactaaagattataatttatttctgtctggcattaaccaggttttcttaatctaatctagcattcttactctaacattggttcaaaacgccagtgaaaaacctagatcctcaaactgttctttgaactacctttgccatcttcctggtttcttcactaattaatacattgagtaaaatgtttaacctggtttcatttcaaatttgtgagtcacatttataatttttaaaaaactctgctttgacaaggggaagaatatcttttttaaataggaggagggctaggcacagtggctcacacccgtaatcccagcactttgggaggccgaggtgggaagatcacttgagctcaagagttcgagggcagcctgagcaacccagtgagacctcatctctaccaaaaattaaaaaaaagaaaaagatagccaggtgtggtggcactcacctgtagtcccagctacttgggcggctaaggcaggaggatcacttgagcccgcaagatggaggctgcaataagctatgattgtgccactgtactccagcctatgcaacagagcaagactctgtctcaattaaaaacaaaaacaaaaggatggcagtgttcttgtgactggcagtgaggtaacagatttcagtaaggagccttccctggaagcagacatgagatcttaaggacctcagaattaactaagaacctctaagaatgacacctaagcttctgcctaccaactatgttattgaaaagatacaaaatagtacaattttaattaaagacaaaataaattttgtttcgaattttatcaagtaatttcaagacactccttgataactggagacactcttactaattcaaatactagggtttaaacatgctatatcttgcattccacaaataaatatgtgaatggtcctttaccccaatgacttatcctctttatataaatacacacacatattattaagacctctccagtgcacagatgaatagactaaaattcatatcaaaccataccaatagtcagttgttcaaaccttccatcagaacagctttgatcagaaatgcatgcctaatcctagtattttaataaacaacagtgcagtgagtcacagataaccctacagaaacacaagaattaaactggataaatttccctttcctggcatgttttctagtatatcttaaaatagacaaaacaaagcaatattaaaatcattaacatttaattcaattttgagttgcagctactgtagtaaatcagtaataagatcatacaagtcaacatcaacacatgtgtactgaaattttaggtagcctagaaaagtaaactatatgataaaaacaaaatcttcatttgcagaagaaaacctttcagaaaatatagtgcaagcttttaccatatttcccacctcccctcaagcttggctaagtaagcccctgcaagtgcttcccctataagctccatgttttataatgatttctggactcatctcctcgggttggaccataagcatcttgaggacagaaactgtaacattttcacttttcaatctccagccactagactaacacaatggagacatggcaagaaatgtttgagggactaattagttaaattccataaagaatgtgtatgtatcaccaggtaactaatctgcatgtccacatcaagaactctgagaagtcacagaggtaccacttgagtgataggcactcggtcccttagggaaagattgtgaaagatattgagggaccagtggtcaggttcgtaagataaaggtttccctccaactcctggggaaggtgcaatagtatagaaaatagagaattagccctgataaaagagaaatccttaaaaaagtattacttattctgtgatagagcactgaggaaagaggaacaaaagctccaatatgaaacaaagtgatcccatctaatcataaataaaagaaaaactacaagtgtttggtttgctcaggaaacaaaagcaaaacacctttcctcaggtggcagggtgacataattggagagtcactgaatactgtacatattctcaaattctcagctgggacactattttcagtctatctcaaactctctcaaaactgaagcaggtgctaacaaagactatttcttcacagtggactttgggttgggtgcaagatgccaaaatagacaatgtaaaatgacatgctcagcaccttgggcctctggcaattcttagcaccagggctacttctaattcttgtgaaagttctatcatacactactccctgagacctatactagcctgaagagaagggaatgaaagaagtctcaaatgttcaatagtgacttactcttgccctacctgtaggcaccccagggatatgagttccttcctctgaaatctgtatttcctgtgactaaattctcagtacaagcttcttagactactagtaattatttggcatgttttatgccttttaataatggctcttagttttctataaggaatggtggtattgctttttctgattataaacataaccattaagaaatgtcattccgtggtttcttaatcaatcattccctgtagtgtgtgagtataggactgggggctcagagggaagcagggagaagtgaagtgctaaagtgctacctccagagccactgacagttctgcccaatgcaatcaggcaaaacaagaaaaataaaataaaaggattcatattgggaaggaagaaggaaaaccatctttacttgcaaggttaaaagctttatacataattacacctcaataaagttgacttttaaaaagccacaaaaagataatgtacttcaattaaaataaaatacagaaactctaggataaagataatatcaagttattaatgcaagtttaaacattaaaaaatagttgctacccactcatcacagacatgagcagcaagctcattaaagattactgtgagcattcattggaataatggaagactcaaggttccaaaggcactgagaccctatatcaacaatgcttcacccttgaaacccagggactgatgatgatacagttgccatgagctacattctgagtaaatactttatcaattattagaatggttcaagtaaaagtaatgaatgacttaagacatctttctgaaatgactctgttatctggatgcctctgctattagggtgcaaggcaaacaaccttctactgtttgtttcattcatgatataaattgctttggcatattccctccaacctcctgaacctcaggtcgatctgtttgtccatttgtctgtttacacttcttttcttccctccttcctacgttcctctccctctcttgtggaagtgtatcagtaattataagagggtgctttatttcagaagacacaattcctgtacctccaatcactgttaccaagcaaaagagttcactgttcaatgtgttagaagccaatactatggcactgggtttttgagaaaagaaagacttttttctaggtcaaccaacaaggagacaggagtctagctcaaatctgtcttcctgtactgtttttaaggcagtatttttattagaaaatgtgtagggagtgaatttggggatagtaggagattggtagaaggaaaggggggtctgaaaaggctttgggcatttgcagtatctcttcatgctatctcatgggtcacatatgtaaattcagggggagttagtacgaaacatgcagtggaaatttgggctgtggcgtcagcaagctcattctgtgtagactctagtttgctgtattggttccaactgatttcagccagttttgttatcttaaaagcagagagaatttcagtgtttcagaaagttgtttttgttttttatttttatcaaccaatcctataaattcaagaatttctctttgccactggttaactctttggggcacagtttcattagtagaccttggcctccatactccaaagaactacttatctactgggtgcagctgaaccatttccataactgagatcatgtaagtcaggaatgtatacacattacacatgtgtgcagacaaaagttcatgacttcacctaccaggtccaagacgagtctccttaggaatgcctgcatacaagcctggcccttggctggtgtctgggaacttggctggtaaaatcattgcctacactaatataaattttttctaaatgagaaaagtagctcacttctcctaaaacatctgttttccttctaggtatctggaatttcagtgactgctatcagtcacactgacagtctgtgctcatgactaacccctgataaaaaccctaaactcttaagctcagacgagcttccctgatagacaacacttcacacaagtttccataccttgttattcagaaaattaagtgcatcctatgtgactccacaaggagaatattctggggagtttgtatctgatatcccttgttgattttgctttctaccttttcagtctaccatatcttagccatgaatgtgactacctgctgaaccccatgaatccttctatccaatcgttgaacctgggagagctctgacaaaggctagcatgggaaaatacgttgtcttcctcattaacagacccttcttagttatatctcactttctaagttcctgccttccacttcctaggagagaaaaaactacacagcattacctgaacatcatcccagggtaatcacagagcagccatctccgcaaaagaaggaaaaatgaactgtgtaatgttgcaatatttttaactgcaaataattttgcatacaaggcttacctacaattgaccatttttgcactaaatgcttttttaaagtaacaagctaatatcttcttaatataaaaatatacatgtccaacaaaatttaacttgttctgctatcatgaaaagaggaattccagacaaatgtctcataatgtgcagtcagtgggcttatataaataaggactaaaattacaagctcaataaaagatcatcaaaccagggaaaactccaagtaaaattataatacacagttgtccctcccacctgagactcacctgagactcatactttccttccaacatgcctgttctgcctattccctcaagactcagacttcaaatgagttccctttaagtagataagaacagtttcgcaacggattccagaaaaaccaatatgccacctaaaggacaaggaaggcatctacactaagaaaatgaaaagaagtcagagagagaacttcctgacttactcagattatatacccatgggtccacatatgcctaaaggccaaccttgtccttaatctttagtcactcaatctataaaataaaagatttagaaaagggctatgggcaatatggatcttttgcaggtacaaaattttttaagtccataaactttctctttaaaacactgaagaccattagtgatggttataatattcttgtctgaactgagagctatagtcaggctccttttagaagccctgccatgaacagagaaaaaagaaaaggcatgttcctactcctctatcctctgtagacatcttctccgtgataagttaataatgagaagagaaaaccaaccttctagctttctcatcatttaatggtttgaaccctgagtttctgcagcctggaaaaaaaaaaaaaaaaaagaggaagcagcagcagcagcagcagcaagttctcctcatctgaaattcttccctctcctagctcaccttccccaccttctcactcctttgtggtcctcacagtcagatatgaggtaataggtggaaaatacttccctgtgataaggcagtgatgcctgagccacccacttctggtaagaaagctgttcctaaagaatagcaaatggtactcatgttttgggggactctatgctacttagaagcgagtggctaaagttgcacggtgactaattcaagaacaaacagaagaaaaggacaaacagaaaaataaacagaaagaggcatgcccttagcctcaatcaggtagttctaagaaagtgattaggatggttcggagaccaccagccccataccttatccagtcaccaaacaacccaggctggggtgtggttgcctggcaaccacaccttccatgtaccgagtatgtcacaaatatgtctttccggtgtgtgatctcttgactgtgaaaagtaaaacgctaaatcaattcagcaggctttgagtgtctacaatgtgctagtcactgtatcagagatgtggatccagggatgatgcaataacttctgcctccaaggagctcatagtttagtggacatctggcaaagtactcactgattcttgacaattcatataatcatatcaatagatgcaaaaaagcatttgacaaaatccaaattccatccttgatttaaaaaaaaaaattcttggaaaactaggactagaggcaaactttctcaacttgataaaaaatatctacaaaaaaaatctacagggagaatctagaggctttcccctaagataggtaacaaggcaaggatgttctcttttaccactcctattcaacatcttatacaacttctgactaattcagtaacaaaaggcatacagttgaaaaggaaaaaataaaactgccttgcttctcagatgacataaatgtctatataaaatatctcaaagaataaacaaaaacaattagccacttaatctataaaataaaagatttagaaaagggctatgggcaatatggatcttttgcaggtacaaaattttttaagtccataaactttctccttcaaacaccgaagacctggaacttagctgggcgtggtggctcacacctgtaatcccagcaccttgggaggctgaggcatgcggatcacttgaggtcaggagtttgagaccagcctgaccaagatggtgaagtgccatctctactaaaaatacaaaaaattagccaggcatggtgccgtgcacctgtaatctcagctactcgagaggctgaggcaggagattctcttgaacccgggaggcagtggttgcagtgacctgagatcgcgccactgcactccagcctgggcaacagagcgagactccatctcgaaataaatcaataaataaaaactcctggaacttaataagcaattacagcaaggttgcagaatacaaagttaatatgcaaaagtcaattccttttctataaaccagcaattaacaattggaattggaaatataaaacacagtatcatttacattagctgctccccaaaactgaaatatacaggtataaatataacaaaatatatacaggatctatatgagaaactctaccaaactttgacaaaggaaagcaaatatctaaacaaatggagagatatttcatgttcatgtatagaaacactcaatatttttaagacctcaattcttcccaatatggtttataaagccaatgtaattccaacaaaaataccagcaaattgtttcatgggtatcaacaaattcattctgaagtctatatgaaaacgcagaaaacccaaaataatcaacaaaatactaaagaagaacaaagttggaagacagataatacaagatttcaagacaagaccacaaggtactgttgaaagaatagacaaatagatcaatggaacagaatacagtatccatataaatatatccacacaaatgtagtcaaccgatctttagtaaagaagcaaagaaaattcagtgaagaaagaatattctttttcaaaaaatgataatggaacagaccttacacctttcacaaaaaaataactcaaaatgaatcacagacctaaatgtaaaacacaaaaactctcaaacttctagaagataactgtattggtgcccaagagctgctataacatggtaccacaaactgggtggcttaaaagaagggaaaacaaatctgaaaattagaagccttaaatcaaggtgtcagcagggctgcactctatctgaaggctctaggggagtatacttccttgtctcttcctgtcttttggtggttgccagaaatccttggacagcacgattcaactgtctcacacaatttaaaccacaacagtcttctctccaatcccccaaaagtcatatccttactgtatgcaaaatacattcaccccatttcaacatctccaggacccttgacccattccagcatcaactctaagtcaaaattgcctctaaatatcaactgtaatgtcccaaatctcatctcctaaatcacctaaatcaagtatgtgtgagatcctgggtatggtccagcctggggcaaagtttctctcctatggacactgaaatccacaaaacaagttatctgcttccaaaatacaacaggcataggacagacagtcaccttccaaaagggagaaactggaaggaaaaagtgggtcacaggtctcaaacaagtccaaaacatggcagggaaattttcattaggtttccagggcctgagagggctgtctggatccatgagtcaccaggtaatcttttcagtgaatggttgttcagccacacccttggtcctgtttcgggagtatgtttcctggattggctgagaactttcaaacccatcaagtgctggttcctttgcttaacaattccttcctcaagttatctctttccttttgcatttcactataagcagcaaggagaaaccatggccccatctttcacgctttacttagaaatctcctcagctcactgcctacaagttctgctttccacccacaggtaaaacacagttcacccaaatttctgccactctgtaataaggatcacttttcctccagtgtctgataatatattcaccacttcctttctaaggcctcacaagaagcacctttaaagttcacatttctagtaacattctgttcatgacaacatatgtattctctaagatgcaaagaatctatgatagatgctttttctaaaattcccctctctactgagccttcaccagaatcacctttaatatctgtatttctaccaatagtcttttcaaagcagtctaggctttttatgttatgcacctaaaaattattccagtctatacacaattccaaagccacttacatgttttttaggtagttattccaacagaaaaagatttcctggtatcaaaatatgtattcatttcctatggctgccataacaaagtgccacaaattggatggcttaaaaatgcagaaatgtattctctcacagttctgggggcagaagtctgagggtggcagcaaggccatgccctctgttaggccccagggaaggatgtttaattgtctcttcctaacttttggtggtttcagtaatccttgatgttccctggttatagacatcccactccaatttcagcctctgctgttacatgaatttctccctctgtgtccaaatttcccttgttttatagggacaccagtcattgcattaggacctcagcttaacttgtttaacatttgcaaagatcctatttctaagtaaggttggactcacaggtatctggggttaggacttcaaaatattctcttggggtataaaattcaaccacacaacaataataaaagagaaaatctatgtgaccttggttttggcaatgagattttaaatacaacaccaaaaggataatccaggaaacaaagttgataagctggactttattaaaattaaaaacttcttttctgcaaaatacactgttaagagactacaaagacaagctacagaccaggagaaaatgtttgagaaagcacatatctgacagaaaatttctaataaaaaataaacaaagaactcttaaagctcaacaatgagaaaacaaacaacctcatttaaaaattggcaaaataggcatgccactgcaaattccgtgaaacaggagaaaaactgtgagttcccaaagtgtaagagggagaaaaccgacctccaaacacacatccctgctgggaatctgaaaatccagatcacaggagaagaatttaaccttacctagagatggaagggatttagagagtcacacaaaatatgaaagtagaagtagcagcaggaagtgccttgtatgcactcccagtctccagctcgagcacagggacgccatccctgactatatctcactggggcccttgtggaagacaaccagcagaactgcggaagtgttgtggggtgaagaaagctcccagatgaaattggtagtggtttcgactgggcacacattttctggagtggagtccaaggaaggagcaggagctgctgcagatacaagcaagtacaggagtacaagaactgccaccaacagagcaggggcaaggtctgggcggggcattgcaggatatgcgggcttgccaactgcatgggagttgagtcaggcctcttgctactggctatccctgacttccctggcaaactatataatacagtagaggcggccaagatcccctatggaacataaccccattggccggagaaccaacccccagcccccacagtggcctcagcaagccccgcccaaggagcttgcctaaccctgctgcctaaccagacctgcctaaccctgctgccacctgacggcatttccctacctgccctggtagcctaacacaaaacatagaaactctggggagcttcatcccctgaaccctgcccccagcaccctctgctctggagggttgtctttaattgtctatggagcatatatatatactctttccctatggtatataagccctgagtctggggagtaatggtgtgaacatctacctgtcttacacgaacacatttctgcccaagaacacatttctgtccataagtttcccctaaaaatcaccctctgccaataaactagatatgcctgcctcattctttgatttcttggctccttctgtatttggaggttattttgcatatatggccctttcaaggaatatctatctatataaagataaaacaataagctatcaagctataataagatatggagaaagcttaaatcaatgtttctaaagaaaagaagccaatttgaaaggctgcatactatataattccaactatatgacactaggaaaagcaaaacttttgagacagcaaaaagatcagtggtaagcaggggttcaggggttgagctagaataatgaacagaagaagcacagaagacttttagggcaatgaaactattttatatgatactataattgtggatacatgacattatacatttgtcaaaacccatagaaatgtacaatataactagtgaaccttaatgtaaactacagacttcagttaatactaatctatagatattggcttattaactatagcaaatgtaccaaacaaacacaacatattaataacagggaaaaccatggggctgagggggtatagggtaactttctgtactatctactcaattttttaataaatctaaaactgttctaaaagtagtctgtaaaataagatttttaagagcaaacagaacaagaattttaaaagataattgtctgaagcacaaataatgacaattatatggtgcactttataagatatgtagatgtaaaatgtatggcaatcataacacaaagtatgggtgggaaataatggaagcacactgttgtaaggtatatatattatactatatgtgaaatgatatattatttgaaggtagactgtgacaaacttatacagcctagagtaaccactaagaaaagaataaaaagaaggagaagaagcatggaggagaaaaagcagaagcaacataagggcagagtggagataaaatggagtaaaaaattgagtcattaaagaaagcctcatttaagccaaaagggtatgggaaaagaagggactagattaaagaacaggtaaggcaagcgcaaacctggcaagatgatagattaagatctaatcatatcaataattatattaaatgtaaatggtctggccatccaaattaaaagtcagggattgtctgactggattaaaaaagtgagatccaattatatactgtctacaaggaacccaccgtacatataaagacattgataaactaaaaaaatggaaaaaagataacccatgtaaacactaatcaaaagaaggtagaatggccatattaacatcgacaacatagactttaaaaaatgataaacatttccagaaatgaaaaggggcattacataatacataggaattctaaatgtgtgtgtatccaacaacatagcttccaaagtgataaaatgaaaactgaaatgaaaaaaacagaaaaatctacaacaatgttggagacaagtaggcagataataaggacacagaaaacctgaacaacattatgaagcaatttggcctaacttttatagggcatcccagccaacaacaaaataagtattaaagtggacacggaacattcacaaggatagtccatattctgggcctaaaaacaaaccataaaacattaaactgaaatacaaaatatgtttttaaaaatggaattaaaatagaaatcaacagaaataaacctttaaaattctaaaatatttggaaattaaacaatatatttctaaataactcccaattcaaagaagtgacaaaggaaattacacaatattctgaattgaatgaaggtaaaaatacaacatcaaaattagtggatgcagctaaaacagtgctgatagagaaatttatagcattaaatatttatattgggaaataatagaggcctcaaatgagtaatctaagttcttaccttaagaaattaaaaaagaaattaaatccaaggcaagcaaaaagagggaaataataaagaggaaaaaaaatcaatgaaatggaaaataaaaaaataacagagaaaaatcaatgaaacccaaaacaggtccatgaaaagattttaaaaaaaattgctaacctctagaccctcaatgtccagtagaactttgtataatgatgaaaacattctatatagcagcaccctccaatgtggaagccacttgggactactgatcacttaaaatgtggccagtgtgactgaggaactcaatttttaatgtaattttattgaaattaatttacatttaaatagacacatgtgactagggataactattgaacagtgcagctctagaattgactactgaaagaaaggaaggggtgggaaggaaagaggaagaggaagagataaaggagggagagaaagagggaggcagagaagatgagatacacaaataaccaaaatcggaaatgaaatgaaaaagaggacttcactacagatcctaatgttagtgccattaaaaggataataagaaagtattacaaacaactgtatgccaaagttgataacatagatgaaaaaaactaattccttgaaagacacaaagtactaaagttcactcaaaaagaactgagtagcatatacaatctgaatagccatatatagttttaaaaacttgagtccatggtataaaactaacacaaggaaactctaggcccagatacctccctgttgaactctaccaaacctttaaggacgaataacaatcctatacaaaatgttccagaaaatagaaaagagaacactccaaactaatttatgagaccaccattaaccttgataccaaaatcaagaatattacagaccaatatctttatacaccaatatccctcatgaatgtatatgcaaaaaaatccttaacaaaatattatcaagtagaatagatttatttctccatttatttggttttctctcttcaatgttttagagtttttagtattcaaatattacagaacatcattagatttatccctcagtttttcatgtttttgataccattgtaaactgtatttctaagttttaatttccaattgttcattgccagtgctaaatacaattgatttttgtatattggcctcacatcctgtgtctttgccaaagtcatgttatttctagttgcttttttgtagattcctcgggctcctacataaacaatcatgttgtctgcaaataaagacaattttatttcttccttttttatctgtgtacatttatatcttttccttcctttatttcactgactaggacctccctataacgaacagaaattgtgaatggaacatccaatgtgatgctggtataagaatagacatatacctcagcaggaaagaacagagagattagaaataattcacacatagcaacaattgatttaggaggggaaaggtgccaagataatataatggggataggatagtgctttcaacaagtgtgtgggaaaatgagacatccacatacagaattatgaacttcaccccatactcatattatgtacaaaaatccactcaaaatagatgacagacctaaatgcaaactctaaacctataaaacttctagcttaaagcttaggggaaagcttttgtgacactggattacacaaagatttcttaagacactaagcacaaaccacaaaagaaataattgataacttgactttgaaaaaatcaaaagcttctgctcttcagaagacagcattaagaaaatgcaaagtcaagtcccagtctgggagaagatatttgcaaaacacacatctgaggaaggacctatatcctaaatatatagacccttataactcaaaaagaggacgacccaattttaaatagtcaaaagatgtgaacagatacttcaccaaagaagaaacatagatggcaaataaatatatgaaaacatgattaagacaactggtcaacataaaaatgcaaaggaaaaccatacgaaatactgctacatacctactagaaatgctaaaatcaagcacacacacacagtccaatacaaagtgattctggtgaggatgtggagcaaatggaatctcatgcattgctgctgggatctctactcatcatcttgctttatttttcccaaaaccactttttattaccttaaagtttgcttacccatgtaagtccatatatatcttctcacatgtttattgtctatcttccccaatataagtactatgaggctggcaacttggtctgtcctgtcatcactgtgtcattctggcaccaagaacagtgtctggcaatctttacatatttattaaaagtgaggaaggggtggaaagaaaagacactaagacatctataagtgaatatatgaaggcaaggaacccagtcacagccatctacagaggagcgttaagagaaaattaatttagaccaccaggaagctgcatgttgtaatgcatgattcccaatttcagctgcacattagaattagctggagagctttgcaaaatcccaattccaggccacaccagaccaacaaaatctgaatctctgagaatggaacaccagcactggtcatttttttttttttttttagacggagtcttgctctgttgccacgctggagtgcagtggtgccatcttggctcactacaacccccacctcccagattccagtgattctcctgcctcagcctcccaagtaactggaactacaggtgcatgccaccacgcccagctaatttttgtatttttagtagaaatggggcttcaccatgctggccaggatggtcttgatctcttgacttcgtgatccgcccgcctcagcctcccaaagtgctgggattacaggcgtaagccaccacacccagccaagcactggtaattttaaagttcccaggtgatcccagtgtgcactcaaagttgagaatcactgaaaaaatggaacctagaccttggaaatgtacacaactgagtgtgcaagctacttaacctcccttagcctcaaaattctcatctacaacatgggaaatatatgtacctcccagagttgctgaaatattgagattctatataaggctctcaggaaatgtaaattctcatccccaagggaaacttgatcaaatcttcatagcttagggtaagaaatgctaattctaccagcaattcacatttttcattgttagctgattattttattgaacatttacattgaggaaattcagaaatgctcatttttccactttcctggtggtaagatgctgcctgaagctatgtttaaattttcaagagtaaataaactatggcgggaaatctagctgactatgccagtgaatctcaaacctagctgtacattagaatcatctcagaaatttttttaaagaaacacacgtatgtccagaactcaccaggccaaattaaatcagaatccctggggtggctccagaatatcagtattttttaaaaaagctgatagaaaggtaattgtaaaacacagtcagggcttaaaagcactgatttgtactaacgatatgccatgctaactgcacatcacagtcacttggggagctcttaaaaaagttgattgattccagaaccctaccgagacttactgattcagaatctgtggaagtggagcctgtcattgtgcaaatcttcataaaactccccactggtgattctgatgcaaactcactgagaaccactactttgtatcatacatttactctacgtgttgtatatcagaaagatcatttaaaactttcagtggtctcaaatgccaagcctgccagttacttttaatcagtaactgacacaacacatcacagtaactccaatgactttacagatcttttcagaacacttttatgtccagcccactgacccacatcacctaccctatgctgtgccaaatactggctatgtagtccgttggtatttctaaccaaattcctctaaatgggctgctgatctgggaaaagcaacatggaatcacattactccccaagccttattcccctttgctaagtggtatgtaatgccaggattaatgaaatgaactctattggtcaaatgagtctgaatgaaatctgagttgttgtctgctcctggaagcaaactgttatctatttgtttccctcagagagataaactcagaggaaacaggagtgatccctgaggtgggaataatatagtgggctgcaattttaaaactctgcttagacaataacaggacacttggaatcttattttgatagatcaaaccaatcagtatatacagcaccatggtggtactaccaggcaggtgataatagtagcatttaaacaaccaggcactatattaggcatattaaatatattaactcatgtgattctcaactgcgatgataatagccctatcaggcaggtactattattatttccattttgtcaaaaaagaaacaaaggcacacagaagttagatgatttacccaaagtcccatagctactaagtggcagttttctgaaaccaggcaatctggctttggagtccaacatcttaagtactccactgcaatgcagatgagtgatggccaagcagtttaaaaaaaaagaaaaagttattgtctgcagtagaaactggaggtcagggtatgggtaccttgggcaaattacttaacctcttggagcctatttttgcatctgaaaaatcaggataataattgtacctgccttgtagagctgaggtgatgattaaacaagattaggcatgtgatgtgcttagaaaagtacttggcacttttaagagctttctgtcagccattattattatttgtattttaaaacagctcaagtggtcagggagaaatgaaaatctattaaactgaaaattttcctgccaatcttagatttgtagattctgtagattaccagtacatcagatccaatatgaaatgcagtcataaaagattttcacaaaaacttaaggactgtcactgtgacaaaccccagcccaaacagtccaggacaatggctctaaaaagcaaacatcttcaattatcaagctgtgtacatgtaaacacaacaggaaccagacttctgagtagctgcaaactgcagttctctgtgatgggagaacatgccccagaacagcctgtcaagtggtaattgccagccatcctcagtcacatatgtataaacagaaaagaaaaacaaaacgagggctcaaataaaaagcgttaacattcattaaacgcctgacactctattaaatgtttttcatgcattaccttctttaatcctcacaacacccttccaaagttgaacatgaaacaaccacactggtttatatcactttaaatgtaagactacacgtctcaaatgggccctgagcactgcctgggaatccaactctatttctctagtacgctcactttcaccctctctaggactctgtcacatatctctcctccaagttcccacacctttcctctcccccgctgccctccctctaagctgatggatgcctataccaatagactcttttcccaccacccactgtatctgcacctgttatctcagcttcccctctagttacaacagagtaagtgtccctgctcatttcaaaaccaactactcacctgcttagggtcttctcctttctcaggtattcaacaactaccctttacaatgttcccctctttcatctgcagcagtttttcctttctacgagtttaatcacattgccatataaacattctgctttcttctatcttgaaaaaaactctacccaaccttaaggcccctcttccccattaaagttgttcttgtcaaaatgattaaaatcctcctaattaccaaagtcatcttatacggtaacattcaacatggttgaccactacctccctcccttttttggcttcgcctcctcttctttgtgtacactattaaactagatgtcttcaccagtcccatatattttaaatactatgtacagtatatgatgccgattccaaaggttaactctagcccgacatcctccagaacttcagatttaaatttctaaaaagcacatttgatatctcaacccaaatatctactagataatttatgtgtgtatatttcaccatactaaaaaaaactaccaggtgactgataaatggagagaaggtgaataggtaatgtgaaaaatcaaatgtgctaaatattcatggcacctgtaggtggtaggtggtcagagtcctctgcaaaattcttcccagctatgcttatgtcttctattgggaaaaacctactgggcatctcaaacctaacacattcaaaacataagtactgattccacaacttccaaaaatgaaacctaccccatcctacagttttccttgagtcaaggctagcatatgagggccttggcatatgggggcattgcctatcgcgttcatagatattctgagcttctagaacagcatctggcacacaggaggcgttcaaaatagctgctgaatggattgatgaattcatgttctttctttctaggtccctcgacctccacccgcccttgagtcattgggaagttctgggctgtctcagcgcctgatgatggcttcttaccaatcataccacacggctgctcctcagggagttggtggcattcccctaccacagagccacagggttcctgtcccggtcccgtctcgcataggcgccccaacacgcgtcacagtgcagctggcatcacacggccagaatcacgtcctgccctctggctgcagcgacactacttcacagctcaggcccacccgggcagtctcccgggccagggccacaacccacgccttgtgacccctgcacgtcaacggcatcttccttcttcacgcccgccctcccacagcccggcgcagcggcctcccgcacgccccctgcccacctggcccccagccacctttcctcacctgggcctgcggggccgccccaactgtcccgctgcaaccccagcagcctcgccagttgggtccacgcctagcctgccggccttcgtcgctatccaatcccacctgcgcccgcgagcctgcgcactggagctttgccctgcgccgcggcactctgccctgcgccgcggccctctgcttgccaggccgggagagacagaacctgcctctaccggtcttccaaggcactgagagcccatcgccgcggacgccgctgtaaattccctgcgggccctgtgcaccaccctgtgcgggtccccctctcccaggccaggctgataatgtcaacagctctctgagctatgctcatatcctgaaccactgaggactgtgttctccaggaatgctcgcctgacccacgcctgccctctaagcccctaatgaggccccagagggctggggtgggggggtctctttgtagtatcagagcagggcagataggcaaaaggagtcagagcctgtgccagaatatgaggtcagttggctgctaggtcaattaagacaacttcagcaagggtggtcaatgtagagggaattcaatcgttggcattgcctgaaaacaggaagccagaatctttttatcttgacgaacaaacctctattcattggtcctgacctgagccactttggtgaatccagataccctgaaggtgtgacaagacctgcctcacttatcccccagccttcagtgctggtcccacagagagccatatgcttgagctgaactgcagttaagcagtgacagctaccctctgtccaggctctgaggccagccttctgctccgtgagtcactgacagtgagtctctacagagactttttctttctgtagcagccaaggtaccctgcaagcaacccacgccattgccatatgtcttagtttgtttgtgttgctataaagcaatacctgaggctgggtaatttataaagaaaagaggtttgttagtttcacagtttcacaggctgtaaaagaaacatggcaccaccacccgcttttgatgagggcctcaggaagcttccactcatggcagaagacaaaggagagccaatgtgtgcaagacagaggaagagagagaggtgggaggtgccaggctcttttccatgaccagttctcatgaaaacaaagactaagaactcactcagttccatgagactagcaccaagtcattcataaaggatctacccacatgacccagacacttcccaccaggccccacctccaacattggggatcaaatttcaacactagattttatttatttatttatttattttgagatggagtctcgctctgtcgcccaggctggagtgcagtggcgtgatctcagctcactgtaatctccacctccccagttcaagtgattctcctgcctcagcctccccagtagctgggactacaggagcatgccaccatgcctggctaatttttgtatttttagtagagacgaggtttcactgtgttggccaggctggtcttgaacacctgacctcaggtgatccgcccgcctcagcctcccaaagtgctgggattacaggcatgagccaacgcacccagcccaacattagatttagatgggacaaatatccaaactatatcaccagggtaagattcccctttaaagatggaccccatgtctaatgtttcttcatagtgcctaacatcaagattctgcactggtcatcatttcacaaacatgagcagcatggctgctccaagacacacagagggaataacccccattcacatcaccaggaaatccttgcatggaggctaaatgaacagttggtaagagtggaccctgaggtgtcattccatctcccccagacttcctgcttgaccacacaatattcccagaagccagtgacccagaaggctcttcttggctttctgtccttttacctgtgaaaaattcgaagaactataaagtttagggcccatcacagtttactacccttctttggaggcctctttaaacccttgagtcttaccaattaccagtagcactaggagctttgcaagcctggccttaagtccctgctttgctactgaatagttggtgacctttggcaggttacttcccaacttgtgtctcagttttcctttttttaaaaaaggagacacagttgcaagtgtttaatgagacaaaaaacagaagcattcatcaccacgcctggcagtgaacactgcttttcttgctcaagaggtttgagccatacgcttctctaggtctgtgactctcccagagtttctgggagttcctctgtgagcaacagacccactgcagtctccatacttcaggggtaagcctggatgcccttcacacatcagtctggatgagttcatgcaccactcatccaaaagtgaatccaaaagtgattccaaaagcagaggccagagatctagttgctaatgttgcctctcctcatggttctaggattcagccacacagggcttcccattgcagcttcaggtcctcctcactccccagtgcaggcccagtttcactctcaggtcctccagcccaggcctcagttctgcctcttttagtccatccctccagatccactttccaacagggctgggaagtcgcttggttgtcccctgcctgctgcaccacagcccccagacaccgcctccttatttcctgcatggtccgaggctcaatgctaatccctgggtgtcttagtctgttttgtgctgctataacagaattcctgagcctggataatttgtaaagaacaaaacatttttttctcacagttctggagaatgggaagtccaagatcaggtgccagcatctggtgtgagtcttcttgctgcatcctccagaggagaggaacattgtgtcctcatgtggcagaaggcagagagcaaataggaaaaaggaaggcaaactcaccctcttctaatagcattaatctcacccagaaggacagagtcctcatggtcctttcacctcccgaaggtcccacctcctaacactgccacagcagcaaccaaatttctttgaatattaatacatgagtgtgggaggggacaaacattcaaatcatcacactgggaaggctcagctggaggagcagaattggccagcacagggaggtaatgctgggtttggaatttttgtctttgcagtccttggccttgatccggatacccagacgccctctgagatggaccttgagggccgtgccaatgtctgctctctgctgaggtagggctcatctactccttacaagtataagaacttactgccaaacataccctcctccaagccatgggtccccagatacagtcaggaggaccccagtggatagctggaactcaggacctcaggagagatcccaaggcctatgctcgagttcagagttttctaattcaggcttggagcccaggaacagaagataactaagaacaatactgacagaaaaaaataatcacttcattgacattacccttcacaggaccgcctgcttcaggcctgtgctttgcagcctggttcatttgggaatggtatgcttcacacccagccctgttaagtgtgagttgatgaggaccatgagcttggaagaagccgtgggggcctctctgtgtgtttctctctgccctgctttgagacacttcacataaaagactctataaaaataaactgtggagatttcaatgccagtaaaaatcccagtggaggtagaaaactatttaaagagcacaaggacatacatttatcttgttgtgaatccccggctgcctggtccctgagcctgacacacggcagatgcccaataaatattaatagattgatcaatttgttggctgctcatccatttgcagcttcagccagcccatggctctgcgtgcacacaccacaaggagagagaatccatagacttcgacaggagagagctgctcagctggcaggagagcctgccacaaacccttgaacataaatgtcctgccctccacttccagctctacgtactaactgtaaaataatgatgtggcagaaagtgaagtgcaaagactgccaaattctaagaaagaacctggtttcatgccttttaatccttatgagtcattccttggtctgcgccaagccctgtgctttacagcaagaatacagatgtcttcattgaactgcatctcattagctggacctaacagagtgcaaatttctttccaatgccatttgaactcaatgcccagatgcttttttcccctgggcccgtgcagatgaaatcttgggctggtttataactttgaacacccagaatattcccatttcagtttaagattccctctgacttatctaattgttaggctctcttcaccttcagcctgagaaatgggtaccatcaatttctcctttctcacccagcttcacacccaggccctccagactcagtgggtgtctgacacctctacagctggagtccttcagcaatgggccccctgggctcagcagatattttgagctggccatttcttctgtgagacaatcttgtgttttctcaggaattcccctgcagaagatctctgagtacaaacccatgcccagtgatgttgcctctgcccagctacttacaagaccattcctcggcccatccagggctaccaatctgtttatgtaatttgtgccatgaataaaggtaccagacaaatgagtaagtggaggctgagttgtaggcatggttttgtgccccaataatgggctgcacaggaaaggaagggccacctttgtgtaattcataagctacaggtggatgcctttttgtgattccccctaatgcatgctctgtgtgagctgaggctctggctctctctctgctggggtcaacatcacccctgcttgttttacaggctatgacctgcctgcagcttacttgcctacataaaaagggcatccgcgcccttgccctgacacggggattggcggttcactcctagcgccatcctctttctctttgctctcccgccagacatgttgttgccgtcatcacctctcaccatgagattgctcagggatgttccagacaccaagccctttcagaagacacatgtcaaaccctgtatatgatttgagcagtctttctcatgtggctggagggaaaggagaggtacctcattcctctcccctccacaaggaggggaaagaggtatggaaggggaaatgtcatagcattccaacaactcttttcagaggaattttctactcctggcctcaattttttataaaccctcatgggtgtgttagtggtggaagttatctaggttatcggtggcaaacctgtatgggtctgcagcaatctcaactcttgcctcctcagaagaaagaatctgaggtgcataaggcagaaggagaggccaagacaagtgttagagcaggagtgaaagttcattaaaaggctttagagcaggaacaaaaggaaagaaagtacacttggaagaggcccaggtgggcaacttgaaggacaagtgccccatttgaccttgaacctaggatttcatatgctgaccgacttccagcattttgcaccccatttcccttgatttttctctcagggtgagctacccacatgcacagtggcctactagcacctgggaggtgagcatgggcagtgtgtttagtggagctgtacgcatgttcacctgaggctttcttccctttcctggtggaatgcctctggaaggtcatactctgccattttgcccgttaatgtgcatgcttgagcccacttgcccaattcctgaaagctgccagttacagatgtttttatctattgggaagctgcctctctctggtgctggctgtgaccagttattctttcagagaggcaatgtgacaattgcctgaccatcacctgttggttgcctgacatttcttgttggtgggggtagccctctcctgctctgctcctgcctgactagctacctaccaggagctccaaatgactgcaagagagagtttggagatggtccaagagctgggattggaattggagaactaggttatagccagatactggagagtttcacatgccatgctaagaaatttgaactttatcccataggattgcaggtgaacgatattcagcaggagagtacctggtcttatttgcctctgagcatgctgggtggagaggcatgatgaaagtggagacctctttggtgtgcactaagtaggttaataagcaatgttcagagaatcttccattcaaagtaaaaaaatttctcacctttttttctcatttctcaaggtggtttctaattcggtcttgagagccagacattcttcctggtttgggttttgtattcttttatgagttcatcaatcaggtgaggccacaaggggagacttagtgctcaggaacacaaaacctattatactcttgggtcctagagacagcaggcacagcaggcacagcaggccacatggggaagacaccagggtggccaggagactgaggacaggagcatgcatttgatatacaaactaaccagcacagagctacatctctatctggccctacgctccagagaccatattcctctccttaatcatcccagggccaggtacaagacaactagaaaccgtgcctagagccaaagcccgctggaatgattcaaactagctagtcctaagctgttcaccctgccttgccttgcctttcccatgaaacccggtaaaagctatggcctaggtggccccctcacctgtcttctgcctcctgaccaccctgatgtctttcccatgtggagtggcatggaatgcctcctgtttctaggacctgtgtgtatcataaactttattttcctgagcctgtcctgggtctcttcttgtggccacacctgactgaccacatcataaaagaatacaaaacagcttgccaggtccttaggtgggcagcatgattgagtgagaagggcataggcctgggttttatttcagtgcctttatctacttgtggcctcagacaaattattgaacttctctgggtctcaatttcctcatctataaaaatgacccttgcagtgtacgagtcagaataaactagattatgctgctgtaatagataaaccctgaatcttagccacctgtatcagtaaaggtttccttcttgctctcagtgcatatgcagtgagggtcagctggctactctgctccctgctccctgacttagcacacaggctgatggcacgcccactgtctgtgatcacattaggatcttggtgacagatggaaggagcactctggtgggtcgtccacctgcaattaaatacaccggcatggaattggcaatccatgcctctcctcacagctccgtggttggaaatcacatggccctgctccaccacaaaggggccctgtgtgactaccacagatgcctactccacaggtgtagggtgagggttacatgggctacaacacaaagagcctggtgcagggcttgaaggctggcaggttctgacaaaactcttctaggaagagcagcctccacccacagctgtggtcaagactgccagattcgcactggcaagtactttagaaaaagcatactgtctacagtaacactgctaagcatggagacttatttatttatttttgagacagagttttgctcttgttgctcaggctggagtgcaatggtgtgatctcagctcactgcaacctccgcctcccgggttcaagcgattctcccgcctcagcctcccgagtagctggaattacaggtgcccaccatcatgtctggcttaatttttgtatttttagtagagatggggtttcaccatgttggccaggctgctctcgaactcctgacctcaggtgatccacccaccttggcctcccaaagtgctgggattgcaggcatgagccaccgtgcctggccagagcttttcactttaaaattatttcaaaatggtaaaaggaaatctgaaaagtccagtgaaggaaaaccacttgggaaacagaaatcccaaagatcaggattgataaatgtctctatcttcgagttatagacagagagggctccaaggacaaaatttgaggaaagatggttgataatctcttgtgtaagaaagttttcatttgcaagaaacaggcagagcaacttaagctggcttaagcatgcatagactgattgccacaggagctccaagtcccgctgcatgacagggttcagttggttgattcagttataacaactgggaccccagctctcaccattcttcctgctctggcatccagagtgttgatttcgcttggcttcctttgaagacagatcccttttaaggtcatggaaaggctgtcagaagctatacagtggggtagataaataattgcttctggaaattttccctaaagatgtgtgggcacttttctaaaagtccctatgaaatatttgtgtgtttcactggcttaaatttaactatgacttctgtccctagcaagaagggttgccttaaagccaattgggccttcccttctcccccacctctccttaacttcttgtaaccactaatccattctccatttccataattttgtcattttaagaatgttctataaattgaatcatacttgtactacctttggggattggcattttctcattccacataactctctggagtttcatagaagttgttgtgagtatcaatagttatttcttttgatatggattaccacatgttacttagccattcacttatttgaaggatatctgggttctttctcatttggggtcattacaagttaagttgctatgaatattttcgtaaaggtttttgtataaacacaaatcttaatttctctaggataaatacccaaggtgcaattgctgggtcttatggtgatcgtgtgtttagtttcgtaagacccaatcaaaccattttccacaatgtatacactattttacattcccatgagcaatgtatgagcaatcccctttctccatgtcctcagcagcattaggtgttgtccttattttttatttgaccatcctgatacatatgtggagatatcttattgtagtttagtttgcatttccccagtggctaattgaagttgagcatcttttcatgtgcttatttgccatctgtatattatcttcagtgaaatatccattcatgtatttttcttattttctaatgggatttttttcttttgtcaaggttgagttttgtgagttctttatgtattctaaatactagtcctttgttccggatacttcctcctcatttgttgcttggatcttttatcctcttaacagagactttttacagagaaaaagaataaacaaaaaacaatttgtcaagttttccttttctttttacagatcatgcttttggtgtcaagtctgagaactctttgcctagccttagatcccaatgattttcttcccctttttttccctaaaaatcatatagttttgcattgacatgtaagtccaggatccatatggagttcatttttgtacaaggtgtgaggtttaatgtcaatgatcttttttttttttttttcatctacggatgtcctattgttccagcaccatttattgaaaaagcaattctttcctcattgaatttctcctgcattttgtcaaatatcagttgggaatatttgtgtgggtctatttctggattatctattctgttccattgatctatgtgtccatctttctgtctcactattactgtagctatatagtaagccttaatattaattacagtgattcctcccactccactctagtttttgaagattatagctattctagtgcttgtgcattttcaaataagtttcagaagatatttttatttgtataatgtaaattacattatgaatatacaataaaatttataaaattaatttcagaataaactcatctatgattacaaaataccttgctcggattttggtaagaattgcattggacctataaaattaatttggggagaattgatgcttttactatgttgagtttggaagcccacttttgcactacaatttagtgctgaatatgtatatgctttagcaacctcataacaacggtgtgctggcacataataggagcttcataaatatttatggcagggaggaaggatgggaaggccaagtgaagtcttgaagagtttggatcagttgtccttaaatctggccacagaaacaaccatctgctgagcttggtaaaagtacagatttctgggcttcatctcagccctactgattcagaatctccgggatgaggccagtgaatctgtattttgaacacctgctatagttgatcctcaagcacagccaggtttgtagcatgtagcagccaacaatggaagcagtgtgcaggcgctgagctgagtctcctaggaattagctgttctttctgacatttgccctgaaacaaagcaagtggtagctgcaattgagtccacctaagacaaattaacatgttcttcctgatatatggctcaaaatgagtatagcagcctgggagtcaagggtggtcctttcctacaaggaggaggaccagatgtattttgagcctgtatccaccaatttcttttccaaagaggaaataagcaaccaatgttcagcagaatgtgagcagttccaaaattgtaaatactgttatttaatcacttcattgcatacttgattagttccctaaccttgaggcctgtgaaactgtaatgatgcaccaggggagctggcctcagctctgagagaatttagaacaaggctgttcagatccctggaaacatctttttcattaatagcagaagaagccaaatgacccataagatttttctgtcataaggagaacagaaaaattagaaacaaaagcacatagaggagagttcatgaattagattttagagcacaggcttttttaatcttagtctttgtttttgtttggttggttattgttgctttccttctcttattttgcagtttcagtctctttattttcaatgtaaaatttattatataagtaatagatatataaaggtaatttttaacaaaataaagtgtattctcctaatcccatcacccaaactttggtcaatttctgttccattgctgagcctcccctctgttcacggtgcttctccttgtgcctgcgaggcattccatagttgtaaccagcatgtaattctgagttattatatcaaacactttactaagttgcgagttcttcgtagttatattactttcttggcagtgcagtattctattatgctattgtaccatcattttctctaatgttatcattattctaatgcatttcagccaattccaatttgttgtttttatcaagagcactacagtgaacatttttaaataaattgatttttttcttattctggattatttctgtgggataattctcagggatttcattgttgggtcagtgggtatacccatttttatagcttttgatatttctgaatatgccagcttcagcaaaattttgccagcattggacagtttttttaaattttatgaatgtaatgaatgcaaatcagtatattgacattgttttggttagaatattttgtgtgtttgttggccatttgtattttatcgtatattttgtctatggaaatcctgtattgatctattataaattaaaatgggctttctaaatattaaaaatattaatctttgttcacaattatgtaaatgctttcccaacccattgctattctttttacatgagttttgtcattattattgtatggaagtttaaactttttcaatattgtcagctttgtaggttttctgttgttatacttttggtctactgcagtaagctggaagagtgatcattcctctgcagatctgataaaacgagagcctgtttcctaccagtctttctctgatgtgtgtgtgtgtgtgtgtgtgtgtgtgttttatgtgattctagtagatgaagtgggctttgaaactgaatcatttttccagctctcccagttgtatcaatgaagttgtctccccttcccctatgctgagaccccaactttgccctgctttctctgttacacagcaccagatatgctcctgggcctgcctgtggtcccccagtgtttcttttgtgcatttgctaatccatgtgtctttagttctttgtcctaatatggggtaatgctggatctaacacatcactctgctttctttactagatatccccatcttatttttccttcatatgctttgtagaatcaggtataaagtccaaaaggaaagtccttttaaaagaatgtatagctatgtggagttgtatagaaaagatacagaaagatatcaaaacatattacacccataaccttggagccaagccccttaacagagtccttccactgtgataaccataaaactcctttgttccaaggtgaactatgaagtgcaccctgcaacactgtgtctgtcccggagagtgtgtgccagtgctgcagcaagacttccccctgcctggggtatcttggaggaagagattggttctcaattcctttcacaaagggaagcccccacccccttctcaccacctccccttcccacacacacacacacacacacgcgcacaaagctttgctggacgtaaaccccagaactgaagagaggcaacagccatgattcaaaatgagtcttggaattgacaagcatgctcttcttgaagtgagctcttaacaactgggccaggcccttcatcccaggtcacctttgcaggagcctacagatttctttcccagtggcagagctggtgggtacactctttggaccaaggtcacctgagggctcttctgtccaaaggacctccatgcagaaaccctcagtctctgcctcggaagacggctgttctctgtgtttatctaaaacaataagcagcttttaatgggtgacctcgtcattttgccagtagccttccctaaacagaacagttccgtcctcttcttaatcccactgagcaagggagttttccttagcctcataaaagagaaatattttgtgaaggaaaagtaggactcatgccactttatggaaagacctgtgttacacaaattcacatgaaagacacattctaggggaaatgtgaaaagccaccaaaagtagaagcagacagatgtagtgtgaatccacctgtcctacctgtatgagctcaggaaattaaatcttctaagcccccttaattttttttttttttttttgagacagagtctcgctctttcacccaggccggagtgtagtggcactatcttggctcactgcaagctctgcctccttggttcatgccattctcctgcctcagcctcccaagtagctgggactacaggcacctaccaccacgcccagctaattttttgtatttttagtagagatggggtttcaccatgttagccaggatggtctcgatctcctgacctcgtgatccaccctcctcagcctcccaaagtgctgggattacaggcgtgagccaccgcacccagccctaagccccctttaaaaacagaaataagaatatcactcaaaactgacataaggattaagttaaatcacatgtagaaactaccttacgcactatgactgtcttaatgtctaaaaggaccaaatgaaataattggtgattaggtttaaaggctgcactgctctgtaggcaaagtcctctttataaatgagataatatatacagtggagggggttcagcttataggggttatagacactttggagaatttaaaggctgttaagacctgtatttcccaaaagaagcacacaagtcaacattctaggtgcaatagcccatagatgccatgaagaacacctgtgggctgctgcatggagccaaactaagaactcatgccttgggcactcatgttggcacacccatcctctgtctgcaggggagggtgagacctgttctcctttttgtgcaggatcagtgattctaacaggactcaccctgagcacagcccatgctacagtccatatatagatgagggcatggtagagcctggcacccttgccataggtgagtgcttctccccacccagacccataccacatgttagggcacaagtccaactgtctagtttctttgactacatggaaaaaacccaacaggattgaatgcattaaaaagcttatatcttctcactggagtaattctctcctttgtgattgatgataaaaatagctaatgttttttaagcgcttaccactacacacctggcgttgtcataaccgcatgaagtgggtttggttatctggcagtcagctgcatattgaatggtttaaaagtcatgtgctgcaggtctcccagccagtgagtggcagggccaggcttcaaatctgagctcccccaaccacaatgccacatcttctgcctttctcttcccggctggctcagacgcactgcagatctcagtggactggcccttgtggtccccaccaattgctcagccttcttctttctgtttcccagccctgcggagccagctccaagaagactgccccctgcatacaagctgcttcctgcttgcccacatttctgtgaatccataacgtacactcccaatgctgtaaagtgttgtacttccccataaatgaacatgcacagtcttcaaagcctctgaatcttccactctattaacttgttgcttcctatttcagataagaaccagcccttttgttatattttaatttcaaatatccactctccttatcagctggcccaccactgtcctctgaggctccagctcaatcatttgtggtggctgagcttccttatgtacagccaggaaaatggagctgggacacaataggaggaaagttaaggagtgggtttcaattatacttgaaacttctcaaactgttgtctcgttaagtttcagtggaccttgaaactgtgtttatgtgaaagtttttggaacattcagcatttttaaatatacactgtaagtactttaacagaatgttgagtggttacagacctgcccagaatttaacctcccttcttcccagtgtgacagtttctgttgcccttactttttctgtgtcctcatcaatatgttctgaccctgcctggtgaccaggtcagcttctggtggctccttgcattaacagtgagactttcctgatgctggtctatactcagccacagcagtccaacaagatgggccctatgacaggacaccaagactcttctctgcagtacatccagcagaggggcaggtaggagcaggcaaaacaggaatcagcactagacattcagacccccaaaagagagagacctgaggagaggaatgcacactcctgtacataggaggcagaacagatgggtgctcgacaggtgggccgtggagtggggaaccgatcaggtttgaattctagttctgtcacttacttattggataaccttgggaaagccccaaatgtgtcatgtgtgaaatgggggtgatgacagtccccatgttgtaggtcgttgtcatggtgcaagggccatggtaagtgttctgtgaaaatggccattacaatgacgcatgacccccaaagaagatgcaggggaaactgggcaatgcccacagaccatcccccacccccagttgaagtggcttgatagcactgagccctgctctggtcagagctcagccccagttcacccagccagagtgacacccacctgagggcaccgtattccagggccacaggctcctccaggtcttcccattcactcccactctctggggactcttctggaggcaaagactctgggacagtgccccaagagcagaactgtggcaagggaatggtcccagaatctgcctccaaacattcttcacagggtagctggccttggcatgtagagttgatggtaagatactcttcatcctccgaggtgggagaaggggctccacatggatggtacatgtcaccttccccatcctccccatccaattcaggactagaatacagaagcccatgtttcttccagccttgataaaaaaaattcctcaccccaccttccccttgccttttagaatactctgcacgacacaggcccgtgagactcagccagtgttcaaacagctcatgccagaggctgctctgggcaccaggaagcaagaaacttataaggcaccaaccctggctttgaggagcccccaatttaatgagaagttggagcagtaaagaaatgttacagtccatgtaggaagtgctatggtagaggcagctggagcaccttaccgagctcaggagaccaggggggtgggggggcttgccagagggcacagcattgcaagcagggcaatgacccagttctaagacagactcgtcacatggcaagcagagtcggtcagactttggacaagtttattgacttctttggaacctcagttttctcatttgacaaaactagatggtcaagaagcatctaggattattgggacacgtaaattacataattctgacacagcccccccaactctgggttcctggtatggggtaagtttttagtaaatgtgagatgctgtgattagtactgtgaatatgatggctatttcaacagaagaattataaagaaagggcttcaggaagggattgggagtgactcaagcaggcaaccatcaaagcactttgtgcaaagatcaggtccttttctgagcactgaaaatttgcctatttagagatgcggcaagctgaagtgacatttactccccgcggaaggacacaggaggcagacaagtggtgaagctcattatctggtgatgcagccgcagacgtaatggtcaaagaacaagacttccaggggctgccccaagttcgccacacacgcctcttgattagaaagaatagtccatgcaaaggtagggcattttacacagcactgcagacatgcagagaaggtgctcagaaaatatctgtcgaaagtctggttagaggagatgagaaggaatatctaagagaaaagcacaaagatttagcaaatacatggatcctcatttctcagcctccttacccccacccaaatcaatgggttggctttgttatgtgctgctgctctccttctcctttcctgcattgcctctttctcttaaaattggctctggtgcaccccaatagctacaaacccttagatacccagagagcacgtcctcctccccagtagagccggaagcatctgtcccaaactgagcttcactgtgaaagagacattatttccactcatgagagctacaaggtatgtgaaatagtgaatttcatgtaaatatatgcacactcaagtgtataaaaaagaaattattctacaaagactgaagaggaacactcactgtcaaaagacatttttaattcttgagcatttgcagggaaaattgactttaagcttggctaaatcatgtagaaactgtgttttcttataaacatgggaaagaaacattcaagaagttttatcaaagaatgggaaatctagcctattgcccaggcctaggctcaccactgtccccaccacctcaagcagcacccccttccctcctttctgagctcactaagccttgttgaggagtggaagatggcagctgtatgtgtccattggccactgcagctgcctcagtgtccacacctcacctcccacccgtagactccctccacctcttctaataagctccttgccctctggttttgattctgagctccagctactggctctgcctggacagagacctagagaagccatcagcctgagaggcaagaggcaaggcttcatctgaggttcaaccaaagaaaaagcgatttgctccccacttgtccagggggacttggtggtcccaagggtgaaatcttggccatcatcccaccacaagttgggagaacgactgcctttccttctatccttttgcacgtgccatcaggctgcccttggagatttgacctggggctcaactgtggacatagggaaagggtgaatagggaataaagaggcaccagaagcctgtatgcctatttcacagaaagggcaagacttggaaatttggagaatttcattaagatagagacattctttcacagcaagcctcatgttttgcatgtggacatgatgggtaaagaggtggagttcttcacccagggttcaaggccggccagctcatggctaatgtagcaggactttcagcaagaccctgatgctgtcggagtacacggggctctctgctcaccccctgattctgtgtaatgatctcagcttcttcctgccctcactctctgcccaccaagctgtccaacagaaggaggcttttatagacagatgataactagaggagaatctggagatttcacttgggcttcctggccagccatgtctcccatacaaaccagcaggaccccagaaccagggtccccaccaagtcctgaaactcttcagtgggtatttttaagaggaatcccagttcagctctgaagtcagtgaaaccattctgaaggctctgcttgctacagaatgtttactgagaaaagacactgtgcccaacttttctggacagctgtcctttaaagacttgggccaccaaattcatctctgcctttcaggaggaaattcatagaagcagattgggcatttcaggcttgaaatatgaaggtattataattgtcctatttacttacggttaaactcacaacaaagtttggggtttgtgtcccttcatgtctccagttctccaacatcaggccccatactgatgtctccattagcccggatgacacagctgggagccccaggtctctgctcctgacaactgcatttagttttggcaggttggatttacagtatctctaagacatcaaagtaaacaagttcaacggactgccagatttgaagctcagatgataaatctgagctgaagtacaatacttaggatttgtcacagtagtgtggacagatacccctgggtatctggggatacccaaggatagccctgggagcctgtaaggtgtaaagagaatcctgctagaggcagcatccaggatctagcccaggctctgccgcctccctcactcccctcagccacactccaacccaagagcaggcatgacatctccctcacctggcaactgcatccctccctaactactctgacatcacacctggcccggcccctgcagttgagtgagatctctggcctcctaattatcttttgctattccaggcagtgcccttccccagaaggtatatcataactttaggttcatttccaggagtcctgcttcattttgctttcttaaataaatgaccatcaagatttataccatcactttcacaaagtgatgcttgtggaacttacgtgcattttacttacatgagtttaatgatatgtgctaggcaaaaagagaaagagaaagataaccttaaacattctgcaaagaccaactttccaaccgataagtgtaagccttgaagtgcacatgagtgggagaactaaatctttcatcctgtcaatctgtctctgtttctattgggccagcatttaaagacaaacattttgcatacagcatggcccataaatgcaagcctcctaacttcatctgaggctcgaccaaacaaaaagtgatttgctcccacaccaaggggcaaataacatcactccttccaaagtgatgtttcaagggtaatgagacttgatgtgattgttgccttctgcctacctttaggaactaaccttataaaaaatatgtctccagccaagctttccctctgataggcacgtaatccaactctccttcataaaaatgtactgtactgctttattacaagatatttttataaagatctactactagatggtaaaatctctagatatagagtgtgagaaaagagaacagggaaagaaagtgaaatcgaatcttgtccatgaacactttgggtttgctgtggtgctggcagccatctggctgtaggaaattgccacctggcagatggtaagttccggcaatttgctgggaatttcaattgaagggacctgttctttagctggaaatagctcaggaaagggaaggaaaacagacttgcattgagttcttaccgcatgccaggcactgtgacagcaccctgagcgtgctatttcttttgacctgcacagtaccctgtggaactgtcatggtccccatttacatttgggaagcctccagcttagggaaggcaacgctccaggcatactagtaagtggcaacgctgaaaccacataataggatacagaaatccatgctctttttgttgaagagtttaactcacagatgccagacacttaagaggcagtggcctgcgacagtcacctcagaactgagctgcaaacacttctaaggcttctgcagagtcacaatcccactttggaatcctgattcagaccctatccaggagctgggggaactgtgtccaggggtcgctgggcatgcgtccctcttttcttcctgtagggggcagccactatgtgtgcattaaatgcaaactgacgtcctattggaggagaggtggacttggtttgagttctttcagaggggaggaaaggttcctaagtgagggagggaaaacgaagtaaaaataaagccaggaaatgtgatgaggcagaaagcattcatcaacagaactaccacagggaggcaagagaaaaagggggtgcggttggccattgagagagccaggataccgagaacagtaaagctgcctgcccacagttcatccatgggtacatggaccatgtgggcccggcagtgagtatgatggttgatgggcgttcacaacagactgaagataggagactcccctggaatgctctggacaagcccttgggactctcgtgtggctctaaaaggagcagtccctccaagaatgacagattttggacatctggtatacccttgcaaatagggccactaagccaaatttaatttggttcagaaaaacagaataatgtgatgtttgatgaaaaaaaaaaaaaaaacagcaaatgctaacagataggcagaaataggtatccggacttggaagtagaagacataaagaggcataaagatgtggaagatgtgggagcaaatcactttttctttggttgagcttcagatgaagttaggaggcttaaatttatgagccatgctgtatgcaaaatgtgtaactttaaatgctggccctataagaacagcataacagcataaagatttcaccttaatgtaaggaagaaccttctgatcagtaactagatgatgataaaatgggtcattcaagaggtagcaagttccgcatccctgcagatattcaagcaaaagctgggaccccttcttcaggaatgttatggagcagattccagcatggagtttgaggctagattagatcatttttatattgaacaggctgattttctgtagtttaatgaatgaaacagtgactgcctatactaatagtttaaaataccattttaaataactattggctatattaaattaaaggcacttggcaagtcaaattcccagcttgtacctatacccagggtcactttataattcagctctcagggtccctgttcattatcccaagctatctggcagcaaaacctttcaatatccaaacaagtgcctcctccctacaggaaagtaccgttcctgtaatatatcctttaagatcatggtaatagttgtccttggacaagtctctgtaggttactttctttattattttatcaagtatgtcaattactgcctagactgcaattgtaaagaactataaatacacttatgttatacattatcagacaacgaaagtgaatatcattgatgaatgtgcttgttcaccctgttctactttgcaaaccagttagcttttgtttggctgacacagcattcttcaaaaaattgtagcagggtacttttagggaatgcatgcctggctcctgcttgtcacagctctcatcgggtccaacggtattacacgactgcttcacacttcacagagactatcatttcctatggatctacctttgacagtcgtctaggatggctaccaaatgagagccatttaatctcagtgggtttatagagtgtcaaacacaaacaattgccccttgttatttacctgctttgtgcccatgcctctggctggcaaatgctagaagcaggtcttaccctacatgtgcagccctctgtctgctctcaacaggtttccaagcaccttgtgtaataagtacttgtcaaactgaatcaaagactatgtgttccctcagcataggactgagaatcggaaatacttacagatggatggacacaaaaatgcagactaaatttaaaatgactgtgaaaatgaatgttgcagggtggtcttgaagatatagatgtgttcagaaaacaaaagctggtgtagccaggcatgatggctggtgcctgtagacccagctattgaccggctgaggtgggaggatcacttgagcccaggattttgaattcagcctgggcaacatagtaagaccccatctttaaaaaaaaaaaaaaagctgatgttgataatgaagcattatactagcaatagaaacgaggatgcatgtaggaacttccttcttactacaaagctttaacaggccatggaagatacaagagaaaggtttgtgtgccaggagaaaacctgaggcctgccacctatagcttccaagacatattggggacaattgtggtctgggtagggtttgctttcccaaaagctcacaggtggtcacagcagcaccagaccttatgcttctcttgttgcaacctctcttctaaatgcctggaacagtgctgggcacaaaatcatccaagcatagttattgatggcttgattacaatttcctagcaatgagatgcacatagtttacaaaatgtctgcaaatgtggtgattcttaccttccaagtctcatgatatcacaaactgaatagcagttttgcctcacatccttttccaaagaggtcgccaatgttgattcatccctttcttggtgaagtttgcataaatgagggtgggactcaggagaatgtgtcaaggaactggcccaaggtctctctctgttttggccccattgtgcctctctgatggccttttgggaagactctggcctgagacccaggccttcccctgcatctggggaggcactgtccctccagctgtcctcttgatccaggatggggctggtacatgagtcagtacatgttgccctggtgaattctttgtcagctgagagttcaggtgtctattaaaagaaatgctactaattactggctgcgggatgcacattgtttttttaaaaatacaaagcttttttcccccatgtgattatagatcagagtagttacaagatgggctttgaggtctgtctatcaccatagcatcccagctcctccacatgctcccagctggacactgggcaacacactcaggcaccttagcttagggggctttggaagctctccataaatgtgagccttatttttaaataaaaaatatttgcaaaatttagacaaagataaaaatggaagataaatatgcaaaacaatgactctattccactttccgataagaaatgtttctttttaagtttttcatcttcatctgtcatctcagggcttgtctccctgtctccacccccatcaaggtgatgttctttcctgggtctcctcctcactttcccagacatgacttgcttcgtctcaactgctcacctccctgtcagccttttaggttctggttttgatgatgtgctatgtcttgctgccactgcttgaccttctacagaaaaacaatctgtgtttcagtagaaaactgtttttatctacagcagaacttgctgggttctctgattctggctgtctccactgtctttgagctattttacaactctataaataaacaggtcctttgaaatctcttttgagccagttttaacatctgcctggttccctcactgaatgagttaaataaaatctttaacgtgttcatttttatatctgtaggaatcatgattttaccttttcctgaaaattatcttccagcacttccaccccatgatctccatacctgatgtaatagagcccatgcctgggttcccacccctgccctcacctacaaaagaagaaccaccccaatgagtggtctccccacatttctgattgtacatccctaacaatgagagggatacacctccaaatgtgcacatttatttaattataaatcataaacatttactactcttctgatagactggacattataaaggatacaccaaaaatcaaaattttaagaagaccatattttgtcacattttcatactctttggagagacctccaaaatctgttttctaacctatcctctccttctagctcattatccctggacatgctctccagcaatccttccccactccaagacctccagtctgtggagctgctgcttttcatcattacccccactccccttccctgtcacacatgtcctcggtgtgcctcttattctgcttagattccatggctctgcccctagatgctcacttacagacaaggaagaccctgagctcccacctccttgcccctctcttcctccatcacgtgtcacttgcagattctgagtttccattttaattcctactcaaactgtgtgaacctcacccctgcttctgagcctctgactagattagcttcaagtgtgtgactgcagatgtcaaatgggcagtcaagacttccacataatctttctctgtgtccttaatccattcagttttctacctctgctctctaaattatttctcatcttgtctctctcttcaagtttctaacaactccaccctgaccttgcctgtgacctcacagtgagaatggacacgttcagatgagaactcttcatcttcccacagcaaattccactgagcagcctgtgcccctaccccaacttcagcttccacctctcgccacccatttctgtgctctacttcatggcagcctcttagatgagtgtctcttctcaccgtttccacgcctccctccttctttcttgcacccactagcaccagccttctgtccttaccacccaagggaaggagcccacatcagggtccccagcgacctctatctttctaaagctgaagaacaatattttgtcctttcactctctctctcagcaacgttcaacaaagtgtgtccctccctccttcctgagagcttccttgctcattagccctacttacatggagttgaccgtgagccccacccttgcttggtttttccaccaattcccaggccccatcttaatctcatatgttgtcccatctctgtaccaggcctctcaatgttgttatgctctgtgctgacttctcagtcctctccttgaacttatctgcactctttcccaaggtgatctcaaccatttcatggctttacacgacctctatatatgctgacaactcccaaattcacttttcccagccctgatctcatgcctattctccacaactgcctaatagactcttcactggatagcctataaacatctcagttttaaatgataccaagaactattgtttctcttccatgcaccccagatggccttccccagcccctgtaagcagtccctctcttgggaactggtaccaagagagatgaagtggaaaataggatctatgattaccctcctaaagcatgaaataggtatatgtgatctagtgcaaagaagagaggtattggaatcaggaaaatcaggctttttaccttcttacccctccttcaccctgcattggtggtagcaccatttccccaaggcttcctcatgccaaagcttgattgctctctttcctcatgcctgtttctaatcccaaagtagtctcctgaactccgcctcccagatgtatcccaaatctggctgcttcttaacacttcagctacagcctgagtccaagccacatcatgtttgacctgaatgactgctgcttgacctcctttagtccctgtgcaccagtaacccgagtggcccctctgaagaacggaggagggcatttcctgcttaaccctccatgccagcccagtggcttcccactgcatgcaggatggcggcatcatgctcctctgatccccaaggccctccagggtccctgccacctccacaacttcctccacttctgcttcattaacgatggcccaagcacacttgtatttttgtccctcaaacatccaagtgggttcccatctcagggcctttgttcatgctgttccttctgcctggaatgcccttaccccaaatgtgggcatggctgcctccttctcagaggtgctttactttatggactaaatgcttgctccccagagctgctgacccttgttctgcaatctgaccactggagccacccaagcaaatcacaatcctcccacttggccttcgggtatgaggagggaaagctcacccccacacctcacctggacccttcctgctagatctttatgggctctcctgggaggagctattctccaggatggaaataccacttttttccctgggatttcctagatatttcaacaaaaacacagggtcccagcaccttggcctgaatttgtgtgtgtgaaatttggccctctctcacctggttcggtttcttaacacaattgctgctgtctaccttcttttccaacccagcaacttttggatatctttcccatagctcttccctccctagaggctatgtcaaatgacctcttggagtctaagcatcaacaggatctgggacatcaagtcctttatgttgtcctagtgatggtgtcaccctcaggcacaataagtgatcacttttatccacatcctagagatgaggaatcatggggcctagagaggacaggcaactgcccaaggcccatgcagcacagcaggtacaggtgatccaggtacccgcccagatccccctccaggactgagattcgcatcctactgcctcatctcccctcccctggggcagcccacaccccagcgctggttagggcaacaagcaaaggcacaggttctcttgtcccaattcatggcagctccaaggggccatctctgctccagggctccctccagaatcagctgaggccctgtttatagctgcacattgatctctccttctgccccaccccacctcagtcaccctcacaggggatgttctcaagcgcaggccccataaaacctcccacgctcacatctctgctgcaaaatctgtttcctaggaaccccacagaaggcatggcaatgggtaattgtatctgtcaacttggctaggccatggtacacagataggcggtcacataccatctagatgtcactgtgaaggtatttttttttgatgtgatttgacatttaaatcagcaaactttgagtaaaacagattgtcttccataatgtagtgggcctcatgctgtcagctgaagcccttaagaggaaagactgacctctctgaggaggagggagttctgcctccagaccacctttgggcttgatctccatcaattattctctgggtctccagcctgctggcctcccctgtagaattggactggccagccctcaaaatcacatgaaccaattcctataataaatctctttctctttctctcactctcttcatatataaacacacacataaacacacacacacacactcattctatctgttctatttctctgagaacctgactaatatatgtgtcaaggtaaaaatccctattttcctgattccaatggctctcttctttgaaccagactgcacgtgcctatttcatgctttaggagggtaatcatatatcctattttccacatcatctctcagaatggaaattcttattggaaattcccttggtctgcttctgtgtctactctccttcttcccaggcttccctctctgatgcctgagcttccagagagcctggccctaaaagtttcacagccaaagtctaaacatgtaaacatctacaagaagacccaaatgtcagaagaggcagaatcagggagaggaaggagacctactgaggtttgggggccagctattttcctacccctgtgaaaggaggtggcactgaacctatctacaaccctcttaggaccctagagtctggaaaaggggggcccaaccagagccaggtagagagagtagaagacactgcagcctacctgccattcctgctccatctcaggcagcgcacctggagggggtcggcaaaggaggagcgtgacttcctgtggggcccctctcagtaaatgcagcacctcctgcgagaaaccaagattcactgttagatttgggcttgcattgctggggatgcagtgatgttctccccactgcgtcccaggcactagctcctcctccctgcaccttgatctatttctcactccagagaactccggagaaccctgctgtgggcctgacttttcaaagtgcaaggaaccaaggtcagtggcctgcagcttccacaaagttgatgcaagatgctgggctgtgcatcacctttgtgcagcttgggttctgggaacctctcatctgtaatattgcagtaacctcctctccgctccctgccttcaccagtgtcacccacctgcctccttccacattgctcaagggaatggcaatatctgccaataccaatgccttttcttcagagagagaaagaatgactccaacaaatagctgttcatctcaattgccctttcctcccaacctcccctcatcttgggccagcaattttgcagcctccaccatctgaatctctaaagcctgacccttggctctgagcttcctatcagggctcggcttgggctctgggaacctctcacctgtagtattgcagtgacctcctcactgcttgctgccttctccagtgtcacccacctgcctccctctgcaatgctcaagggtagttttccacagtgcagatataactgagtccttcccccactgcacaccctggctgactcacttttccctcaatgtaagctccaaggcatagcacatagaccccgtttctgcctgcctctgcctctcaccacagttccctctctcccatctactcccctctgcacccacgtcctaagcccctgccatgctgaatctgttgctccaagccaccctctcaatgtccagggttcaaggttgcctcgatagctcctatttcctatttagaccaggatttctcaaactcttggcactgttgacctctcaggctggacaattccttatgcgaatgcctgtcctgtgcattgtagggtgtttagcagcatctctgatctctactcactagatgccagaagcactcatcagttgtgacaatcacaaatgtctctggacttaatcaaatatcccatgagaaggaaataatctctgcttaagaactgctgatcaagacactccccagtccctgcttcagccacgcaggacttccaaggggtgcacttctttcctggctcactggtgtgagcactgcagcatgggctttcatctctcaggatacatatctcctgccatcaccgctgttttctgtccatgagctctgaaactgcatgagctgtcttcctctgtgtcttcagtctctcatagagttgccagcccagcagtggttctcagagaagggttcttggatcaggagatggatggatgaaggcatgccctcccacccaagcatatggtgttctagagacctccccccagccctgcccagagccactgtccccctttgtccatcttgctttgtgtttctggagctgacttataaaggctgcatgaggcttcctgttgggctcagctaggggaacacggcaagagaccagagacagggaggagcggaggtcattgctccttccaaattcctcccttcaggttgccatgggacgactacaacctcagccaaagtgagagctcatgccagcgagtcccctccaacagctctccattcctggggtggaataactgctctttcccttcccctttggcctcaggataggggtaactgcatcccactcttcctatcctagccctaggccacaacatgctcccttgagcttcctaacaacctgcccacacctttattaaatgttcctcaaatgactccattttcttccaggactctgtctaatatatacagtatttcattactctctcttcttaaattgcattttttatcatagacaggacaatcagtgtaataatgtatgaaaagctgtaaatgtgttgagaaatgggaaggagagcagaaagggacccactctagtcccttcagccccacgcccacctcccaggatgtgtgtgaagagatgtcagccagcacaaaggccagggctttatcttcagcttctctcatgaacccagtgagaagcaaggctgactcaaggtcagatatttaaaaacagagattttaaattaaatgtgagcatgtaccactaattactctctttgtgtgattaaaatccgggctgctggtgtgatttttgagagcccagagttttccccacggcagcaggctagtaagaggcaaagctggggccagcctgcacagagagctgcattgcccatgacccccggcacctggaagatgaggccttccgtggaccttccattcacggccaggataatgtcaccagctgcaatggccccattctcctcagctggctgccccggaaagagcctcttaatcctcacaagatcacttttgagatggctgcagctctctttctccatctgcacgaaactgaatcccaaaccattggcattcttttttagtttgacttcaaacttaggacctgtagtgtgggatgttgataaaaataaattcttcagtagattacaagtgaaattgaccagtctcaaaatgcagattgtcaagtagatgaattatttcttttacgttcaaataattcctttgccaattttatgacagagtacattatgtatgttatagattagtgctgtccaataaaatataatgtgagctataaatacaaaccacaaatgtcattttgaagttttcaaatagctacattaaaataaaaggaaaaagcaaacaaaaaataaataaaacaatttaaaaagtaaaaggaaacaggttaaatacgctataattgtacatctaatttaatcccatatatctaaaatattaccacttcaacatgtcatcaatatgaaaaaattattaatgagatattttttattcttcttatgaactaagctttcaaaatccaatacatattttatccatttagattggtcacatttcaagtcctcaataaccacatgtggcaagtggctaccatattgaatagcacaattatagataactcaactatgtttatacataaagatatagctgctaggcatacacaacatgctcttggcatttaataaaacttgtatcacatacattcctattactcctttagaactctagtcatttgtagtatacttgaaactaaattttgaataattagaccatggagaaaattatggccaattctatggacaatgctttagctgccattttgtttacccatgtaggctgaccataagacaaaacagttgcctctgggcaccaaggatgaacagagctggcaacctacatggtctgtccaccaaagaggcctctgggctgccccgctggcatcaatgcacagagggacagagcacagcttgcaaacttcaccagggcaagaatggaagcatgtgaagcaattatgtgaagcaattatgtgaaggtgtgtcacacgaccagttctaccatcgccctaaggcctcctccactctttggagtccatttctcaaaggccccaagggagtgagcaaaggggtgaggacagaggagacttgatttaaacagaagcatgcccctttgccccacccctaccctatggctggcttgagtcttctgcagcaaaatcagaaaatctctatgaagggactaaaacatggctaaggtccaaatcgttcttactgaggaaatcagcgtgttcctggcaaataccaaaatcacaagggaattgcagatgggcagcccatcggaaaacgtgcagttttgtccctctaaatgatcgttcatttgccttttaaaatgatgctaataacaaggctagattcctgaaccttctctcccaacctgcctagtcattcctcaaataactttgttacaaatgacttggctggactgtgaagccaaatgtatctgaaagtgtatgaccctttcagtcaatttcatcctaaatattcacacaaacattaacattctggcagctgatcaaaggactgaggaaggctgggggcagaaagatgcctagaaatcatttggggaaaatgcatttgtttccagaaacctattccatgagatgggcttccatggcatgaaaaagccgatctcagcatgatcaccatggctcgctttcttttcaggacccagaggaagccttcctgcctttcccttttgacttgacaattcaaaagcggcacacaataacatgacaatagtaacactcaattctctcccctctcaccatctgtcaccgagacacagctcgaaggcctgccaggcaaggctgttaccaaggaaacagccgtgcgttcatctcccatgctgtcattagcagaaggacactgctgtgtactcctggggactcttctctctaagaccagtcttgcaacctagaaggaaaggtgaacaaactcagtttacacttcatatggcaaccaggaggcactcccttgactctgcaaatgcttcttaattttcgaatccttcctataagcagactcatttgaatctctcaactagcctatatattgggatctagacccagatttctcagtgcttattagacaagtgcacctgaaagcaacacatgtacctccacttcacacatgcagtgccacactcatcttcctcccctcactcaccctcacttcccctcctcattcttcctaaaacactcctcccctcgcattggctcaccccaccattaacctgccaagggccacatttggagtggtccagctctcccccatctggtttctaagatgtgaacattccccatcaagaacagctcctcagtgccccctcccctccacctcctctctcactgccagtgacccgctgggccgtggcaagctctggttaccttggctcgctggaccctgtctgcacccttcttggtccaccccatcatggctgccagtgaattggtctaagacaaaaactgaacatgcaacattcttgatttgaagtctccaatgcttcccatcacctaagacccaaacccatggcaccccaggtctgtaccacctgccctcccctttctttccaatgtgatttcccacatttctccccacaacaccatatacccttgtcgccctaagtgtgattcaagaaccagcagatagacatcacctggaagcttctcagaaatgccaagctcccattcagggcatgtggccctgccttcatcttcctgttgcacctgtcactcagcacctggcccaggatcccagagggacaattcctacctgcttaagctgccaagaggccagccaagtaccctctctacccatgctcattagcaaaggtctaaatatcagaaggtgccaataaattatggctctgttctcaagataggtcaaccaaagtcactaatataagcaaatttcaccagacaccagaaaaacgctttgggaaagaaagcgaaaagtggccagaacattgccccaagcttgctggaagggccttcaggaatccctcctgtctctgttgactttttagttgccaaaagagggtgatgccagctctgtggctcaggacacagaggcagttagaggctcctaacctcaggcagaggactcggcacagtgggataacatcgagtcactgcggggcagggaataaaggggacataaaggatgaatggctctgttcttggcaccctgaattcctacctcattgtgaggaaaagaatcccaggacactctgacccacgccccggtgggtacaacacagggtgagggggaatggcatgaacagggaatggagtggggtcatcccatgcaaacgtagggaggtaagaaggcccatggacacagggccagcggggctggggcagccagagccaggctagagcagtctcttcactccatcttctccattccgctgtctgattccagaattcaggcaagccaccagtaagtttctaaggctatctatggggggtgagattttttttactcagaaacatctatctgctatctcctgggtttcacatccccatagaaaagtgagggtaagaagaaatggaagagaaaaaaaaaaactaacaaagaaaaagtcttgtttcctgcctgcctccctcccacccagaggcgatttcagcttctgatgttgttcaggaaagttccggaaggaggggaagctggtcagcaacagtccactcacctgcccaggacccttcaggcactgcacagcctgcttgtgggtgaggccgcacagaatcactccatccacctgcaggagtcggtcacctgggaaagggatagatgtcatgtcatgacctggtgcttgaggctgcaggaggttcccttccaggaggcccctgcccggcacccctccatgcagcctggagaagtgggaaaggaagctgaggtgccaggtgtccccctggagtcagcaggaatcctgcctctctgagcagtctcactcccttcttctcaggcacatcacagatcagggatataaaagcctttctattattggctcacagaatggttgagccagctctgttcaaccttatccttcctcctgttttcctgtgaaaccgtttttgaaagtattttcaagtcacttagatatttatatctccaggatgtattttttttatttcaaaaaaaggtcagggaggcatggttgacgctggggacaccagaattctaggggaaatggagataagtaagatcctaggttccccttttggctcaattctggcagttttggagaccaataaaaatcacccccttccatcagagaagtgggagctgagcaagggcaaacagaaggctcaggtgtcctccccggatgtgcgagtgagtttaccgaggcccacttgtcctccaagggaagcagtatgttttcccatggaggccaaagagcaacacaagtcttttaagtcttctactatttttctatcacctatgcttcccagtgtgccactgcagaccccccaacctatcaaatgggcagggcagattctatcacctcctttccaggtgagaaaagtatgacctggggaggcaatcatttgcatgagttttcagaatgggagcagggcaaggcctagaggctgcccctcccagtgcagggctctttacaccatggagcacagagttcccaatgaggacccatccccatctctcaccctgtaggatctgcccttccttggcagctggtcctccaggaacaatggatttcacatagataccaccatatggcacactggtgttaatgccaccctgaaaaacacaacaaaaagctcaccacccatctttcctcctccaggaagcctccccaacctccccagctaagggaatccccacctgcccaccactctatcccatgaccttacctccgactggcactgtcttctgtattcacctgtttgtttagattgtattctccactgagcaataagattaggtgttcataagcttaacaatagcaactatgtgagagatctgggcatgtccccagcccaagcactggtacaaggcgggtgctcagcaactgctcacgtgggatgcaccactatctctatataggtagtgaccagcgtaggtggatatggctgtgggcctgaaggcttgtgcctggcacgtcttgtgtgctttgatgggccaaaggatatgtgcatttttcattataatagatgttgccagattgcatccctatgtgaatatggatatacttattcacatttctaccagctttgtatgacagtaccatttttctacgttccaccagctgtatttggccaagctggtagacataaagtttaaaattttattttaatttaatttgtattcctgtggcttttcacgggtttgagtgtttttcatgtgtttaatggccatttggatttgagtgagacatttcaagaattatttttgaaattaaatatctgcaaagaaaatccaagtttttgccagccaaaggaaatcatcaaactcttctcagcaaatatatatttgtgaataacccaaaatttagtcagtttttcagatgaaaaatagctatgtttggtgtctgataaggctgttaccccaagccaagaataaatggaccatatttggtatcagcctgttcactccatgtggattcatgagccttattgcttggtttcttacttggtcccttaaaatcatctactgatgacaaattcattgcaggcttagggtccaagaaaacacatatccttgctctaggtacatagcattatcacaggggaaagcaaagaatgccctccattcacatatctcttgaatttcctctgaaaattttcatcagccatagagtgtccttactttggtgggagatgccattctatttcccatcaacagttaaatccaacaatgacattcctgaaatccagacccattccagggtctgaaggtaatggatcactttttttttttttttttttttgagacggagtctcactctgtcgcccaggctggagtgcagtgttgtgatctcggctcactgcaaactccacctcccaggttcacgccattctcctgcctcagcctcccgagtagctgggactacaggtgcccgctatcacatccagctaattttttttttttattttttagtagagatggggtttcaccatgttagccaggatagtctcaatctcctgaccttgcgatccacccgcctcggcctcccaaagttctgggattacagtcatgagccaccgagcccagcctgtaatggatcactttcaatactcagtaataaaagcagcaccttccaacctctgacctctggattttcaccagttttgtgtgtgccattccccaaccccttgagtaaacacagttatatgggtaatctcctttcacaagggtctaccaggcagagctcagaaaccaaatggaaagtgtcagtcctgatggaggcctggccctgggatgtctgagccagaggctccacactgattctatgctggatgacagtggactgccccacccatccttggccagatgacagtggactgcccttcttacctttagcttgtgtccctgaagccccaatgtgcttctctctctctgcagtccagcttgacctcagagtcaggacacatcagccaactctgcccacactgcctcctcatgagtttggagtcccctagtgcatgccctgctcatcctgaggttccccagtacctctgtttgtctctgaactcatcccccagtgcaggcccccatttgcttttttatttaccccttacatttgtgcaaactaagcacactgtcagaggttgccatctgggtggaatggccaccaggttctagacggacatcttgttaactgcttttcaagctctcctaaaaactcttacagttacgctgaatccaagtgtcccatcttctttaaccagttccacaaagtagatttcaccagcactgatttctggaggtgatggaggacaagaagaaccagcaccctgccataaacaaacaaacaaaaataaagatgggatgaaggaagatgtcacctcttggctcatactgctctcaggagcaggcagcattgcacctcagaaagatcatgagttttggactgggccagcaggggattcatttccagctttatcaggccttctgcatgtgacctcagacaaagcaggaggaagatgagggagtgatgggctgggctgatgccacttctaggcagagaatgcttgggtcactgttcatgttccgctgtccctctgcctagaagatggggtcttttgtcctatctgccccctttacttagtgctttctaatcaccatgaatgttagaaaattctaacgacatgcaggaaaataaacaagctggaggaagctgaacaacgaagcctcaactgctgaggttgagacctgaagtgagaatctaaagtccaccataccacagaggatcatctggccacaaagttggccaagagacccagaagagcctgcagcatctgggttgcgtcctacagcctgcaccatggtcaacgtggccttagagctcccttgctcccctcaacggcccccagccccaggaaaccaactctcaggtttgccaccaaagaagccccagcatgaaggcctctctgctctgcttcctgccagagaggacctaccagaggaaggcctggggtgaaggtttctgctctggaggccaatctgaatcccagctctgtcccctgctccctgagagagcttgggtgtgctcctttgctctttctgtctcaggtaccccacccataaaaggggttgataataggaatgatctcattgggttaccatggagcttccatgagctaatacatataaagtgctcaggacactgcctggcacacaggtaagcactcaattaatggcagctactatcgttgttcttccactggcctcctgcatccagttcctcatgggatgttctgtccaggtgagcaccatggccaattaggaaggcactgtcattcatggagccctattgcatgccagatccttgtgacagaggtcaagacacactaccccaaaatagggcaccttggcacattggaggaattggagaaacagcacatgagggaaggtttctctgaccttcccctgcccttctcttctgaagcaggccctaaaacctaggaaggattttctaatcttcccccgaagcagggcacaagaccctcaagtgagaatgccctccctatatctggaaaaatggagcatcttatgtgggaagacacagggactgagagaggaatctgaacaagcaggccctgctgagttcctcccaccttacatactcctgctttttgtcttatctcatttctccatgactctccattcttcatcaaatatactcagggagaactgtttcttcaggtcatttccgtaagaaggctcacatgtcacataaaacttatagtaaatacacgtggatgcttttctctcattaatctgtctttagttacaggggtcccagctgatgaagctaagatgagtagaagaaagatacgggttttatccccgacactgggcatagtaccttagtttccacggctgtggacagacatcattatctccatcataaaaagagaaacaaggttgaaagaggtgcaataacctgcctgtttcaaccagcaagttgtcccagcaagaatgagaagggcatacactcagcctgagtaagggaggataggtcatgggagacctgttttcaaaggtcttgccagcctttggagaaaccagtaatatcagttcagcacctggggctagaaacactgggtgctgtgaccacccctgagcctgaagggcgagagaagggagtggtcgatggaccctcataggagctgtgctctttgtagaggggcacaggcaacctgtgtcagcacagggagagagtggaatgaagggtgtgcaactgagactccagcactgccaccctgtcctcactcatcccacaactgcgggctcctgctgaggctttgactgggcagaaccaagcagaacacagcaaggtgactcagtccatgagcaccagctgtgcagggcccagagcagaatggagaggctggggcatgggtctggcggggcctgagaagacaacaccactgggagtccaaagagacggcagaggacagcagagctgggactgaagcacacagccctccatacacctactccagatcccatcttcttcctccatggggtatggtcaagagcaaagccactgagttcccagcttgaggaccaattcaaggacaagaataggaggtgcctgattgcccacgccttgccattggcagcaatcaatttcctcatggtgctattatcacaacaattataattagtgactaaagactccagaggcacccacactgagcctgtgcccagacactgtcctagaactctgccttcttctatgcgtttttctcaacaaccatgccatgcaggcatttgcttctgtatgcaaatgaggaagctgtggctcaaacgggctaagtaacttccatccacctgacatggaaaacagagaacaggaagggcctaggggccaggctgttgggcttcacagtctgttctctttcatccagatctagaaagtaaaccaagggatgattacctttaacggcagaaaggaaagctgatgtctcagcctgggcactaagctctgcaccccagccatgtctagttcttcagtatttctgtcctggtcttgtgtgtgtgacaacaaacttccctggtacccgaagctcaggatgtctgtagaggagaccccagaattggctgtgctattcttttcttcatctgggttatttccaccaacacctataaaaacaagccaagaaaaagtcaacagcttaaaaaggctggtttcttggtggcatctctatgtgggcacagcgttttcctccagtgacagagtgatcgtttatagctgctcgggtacaatatgaatttagctcctcctgaaagatgttacatttagattagagaaagggaagattctacatgggatttagaaacctagatagagcttacgtgacccaactatgaatgcgtaggctcaaaagaagttcataagaccagctatcccttattaagctctagccatgtgatgggcaccttagatatacatataggaagatatggacatcttcccatcttctcagcaaacccaccaggaaggtgtaatcccagttcaaacatgagaaaacagagtcaaagctattaagtgtcctgccccaaatgctacagccagcatgtgggaactgtcttaaacccagcctctcctggacaccccactgagcacatctgcagccaccatgtgatccaaaaaccaatgtatcaggtccttttgggaggcttggtaataaccaaactgcaggcccctgtgagtgaaagctaggccactgattcctgctcaccctgtgtctgactcgtgacctggcatagaacaaagaaaagaacgtgaggttgctgatgtttatacattttgcatgtaattactaccatagaattatacacttaaaaatttttaaatgatgtatgtatatcatattgaaattttaaaaagcaaacaaataggaggtgcctaagcttgactcatgttcattaatttgctgacccctttattatggcagtggttaatatattttagaatttaaaattcacttaaaatatgtgttaaaagacagattgctgtttccttagtttctgattcattcatgctggaatggtacccaagaatttgcatttctaatacatttatgtatgatgtggatgctgttggtctgttgatcacacttaaaaaacttctagactacattatgcctaaaacagttcctctgtctcatcagtgcagttgtttaattgatttgttttttttttctccaagtaaagagattaagttattctaatctaataacatgctaatatagtttggctcagtcaggcaaaatcaatcatacatatgaaatcattaacagctgaaaagaaatagagagagacaaagttgggaagagattaaaagtgagagctgatgtgggattgcctggatgcaactaacatcccagttccatcacctttctcctctgtaacactggaacaggtaatgaacttccctgagatttagattcccttgcctgtaaaggagaataaataacaaaaattcctcatagagtattttgaggattacatgggatactgcttataaagttgctagcaaaatgtctggtacataacaagtcctaataaacagttacagatgaaaaaaagatggacagggaataacattcatgacaaatcaatctgaaaaatgttgatgtaaaaaattctagaactcaggatatcttcacaaagtcggtgtattaaaataaatatggcataaaccctccaatgtgagccttataaaaagaggagatttgcttattatgaaaaagagaaagagtggagggtctatgaggtaattattaatattagttttattaaatattagcacatttcattaagtgtgcagcaacctcaagctggtgttattaactgaacttgggagaacatttgagctcatgaactattcacattgttctaaatctaagtaaaaaagtgataaaagagagagtgcagaagctagttaaaatgtgttttccatatatataaatatacataatatataaataaatatatattatatataaataaacataaataaatttaatatttataaatttaacatttataaatatattatatattatatataaataaatatttataaatttaaaagttataaatatattataattatatataaatatttataaatttaaaattttatataaaaagatataaatatatatgtaaatatataatgtataatatatctaaatataaatatatttaataatatataatatatctaaatataaatatatttaataatatataatatataaaaatgtaaatatatttaataatatataaatagattatatatatataaatgtagctaacagttccaacaatgttcaaataaggcaaaggcccagctgcaaccaatccagttgtttctgtacctcactttccttttgctgtccataaatcttcttccaccacgtggctgcgctacagtctctctaaatctcctgtaattctgggcgctgcctgattctcccatcgttcattgctcaaactactttaaattttatatatatatatattttacacaaagaataggctgagttaaatatacatcttgctgtttgcagtgaccattctggcttatcattacagatgtcttgttttctcctatagaagtaacacactttactacttttcaagacagattgttacactgattctatgattgtcgttaagagaaaaatttcaaccaaattaaatgtaaagtagtatgagcaatgaatgatgggagaatcaggcagcacccagaattacagcacatttagagagactgtagcgcagccacgtggtggaagaagatttacggacagcaaaaggaaagtgaggtacagaaacaactggattggttgcagctgggtctttgccttatttgaacatggttggaactgttagctacatttggccaaaactcagtgattggtacagatgtgggctacagttggtttacaacttcacttgttatagttcacgatgtatagaaaaacctttaggttgaactttaatatgtaaggaggcagctttaggctaaacttgatttaacaatttccctctttgggtcattttctcaatcttgagatattgaccaaaactttagttattgatgttactattaccatggctcttgaaacttactgggaaagagcagaacagtgagtttggcaaagatgggaacaaggaccgagtagagggtatgtccatatgttggaacattctgtttacagaagaaaaacaaaacctggtctgttctagaatctgtttgctatgttttccatgatcaaacgtagtttgattatgttacattcagcacaagcaaccccagttttgtctggtttggtctgttggggcctagtgcatgagctcagtccaaaacaatggcctcccataatttcatttaaaagaatcccctttttgttaggtcatgttctcacttaggtgagagtgtgaccaaacttagggccttagcaccactctcagttaccatcattgtggatttctggtctcagcatgtcattcataagttacggtgtcctcatggctgcacatttctttcagctcttgtcattccagttaaagagagaccatttgacattctagagatgtctgcatgcaaacatttaacacttttaaagagaatatagcacaccagaaagactattattatgactatcagtaggataataccaagagttcggagtgtgctccttacccggggtccccataaaccaaaccacccaaaattaaatagatcaaaggatgagctacgtgaagagtctactcacttaactaaagagtctcggccgggcgcggtggctcacgcctgtaatcccagcactttgggaggccgaggcgggcggatcacgaggtcaggagatcgagaccatcccggctaaaacggtgaaaccccgtctctactaaaaatacaaaaaattagccgggcgtagtggcgggcgcctgtagtcccagctacttgggaggctgaggcaggagaatggcgtgaacccgggaggcggagcttgcagtgaggcgagatcccgccactgcactccagcctgggcgacagagcgagactctgtctcaaaaaaaaaaaaaaaaaaaaaaaaaaaaaagagtctcttcattaatcccctacaactaaatctataatatgtgatgttttccccataggccataagtgccagcagctgtacagatacttctgtttagctagtaacttatccagatcaattctattatttagcataactttcacaagagaatttaaagtttattgtgtaaccatagcctttacagtagaatctgctttagagcctatcatgaggaatacatttttaatctttgccgcttttattccaaactatggaaaaaggacctaacaaatgatgcccttttagaagagtgaaagcctcccagcgatgttctccttaacccatgatgtgggttaagaggagtaaatcaatgttctgtttctgactgattatgaggcaatgtacgtaccattaaagtttctcatctacattgggccttcatttttgtctattaaggtataaggttatccatgtataaggctggctgcaaaatccttcacaaataaaagtataccccataaatgcacacaagagaaccctttcacttctattattcatagaagcataagcaagggacaaataatcaaagataagagtcttatgatagtagagaattcttgatccatgatcttgggaaaacctgttcacagtcaaggatgccatcttctggggagaaacccccctggttagcttttctttaaggcttctaatgggtgtacagttccaagagtgtaaagggagccttctcagttgtgagattatgaacccaaggttcaaggtcctgaagttttactgtagtgtgcatgccaatgacagtctttctttgatgttctcagaagatcagtcttcaggttctagtttatgaaggcattgattgtcctcagtgaaccataaaaaccttactttacctggtaaaaatacactgtagtataattatctactgctacaaagatggcagtggcaccccatctggagcagccactgccgtcacatcagctacagcggtgaaacatggtaaagagctggatacaagtgggaaacatgccctttctgagttggtggagttagagcttcctgggaacaggtgcagcagcccaagtagtggctgcagatctgggcctcccattccatggagcacacaggacacctgtccttcaagatgcaactacagatgcccaagccacggctgcagagtcaggcatctctacactcttgggggcacaggaaaaaaccccaggcccttgcagacttggaggtatcttctgctcccattgcctggctcctccccactcttgacatctgctctgatcttggagcaaggttgtgggtaggctcaggtgctgttgcagcctggtgggtgtgcacatgcttgaggcagtgctgatacaccagtaccatactgtctctggcccctgcccaggctttgggcactgacaagcatgggagggaagctgaggagatgctgagggcagcttggcactggcctgcaggcatcctttggcacaaatagcctgggtgccatgaatggcagcaggaggcagacaggctcctgcacagaagggggtgggtccttggtgaggcctttccttcaggccaggatgggtgtgaaggctggggtctgggctgccagtcccgtgaaccagagtgtaaacttgtgatgccttttctggggccatccatggcctctcatggaccgatcagtgtgcatttcttcctttctgagacctataaaagccccaggctcagccagaactgagcagacatagggacaaccagctacagagagcagctacccactccagggcctcatctcttctgagagatgcagatattgggatgcccagctgcagaatggaggtgcccactccaggacatcctctgagttattctgtcactcaatatagctcctctttgctcactctccacttgtctatatacctcattcttcctggaggtagcacaagaacttgggacttgccaaatgacaggactaaaaatgctgtaacacaaacaaggttgaaacatgccccttgctcaccatgttgtggatgacaagaagagagaagaaaaaaagagctgtggctctatgggaacccagacctgggagctccccaggccagagctgtgactcccgctatgggaccctgtggttcctggagtctgcaagcttccaggtacaactgtgttcccttgtaacagccatggaagctgcttgtggtgtgtctggtccagccaaagccttatagtgagctagcactcatgctggcacctggagctgcctgtcccagctgcagcagctggtgtgcctaactgtgttaaaatatattgaacaatatgaacttccactcaccaagcctgacttgattgctcagtctaccagtagcagaggacaatattgagcccctgatatggtgacattccctggagtaatcggctggctgcctgggggcaggctgattacatggtatgaatttcatcatggaagtagcagcattttgttcttataggaacagacacttactttgaatacggattgccttccctgcatgcagtgcctcttcccaaactaccataagagacttacgaatgccttatacactatcacagtgtatcacacaccattgcgtgtgatcaaataagtcacttcctagcaatagatgtcagcaatgggcccacgcttatgatccaatggtcttaccatgttccgcatgactctgaagcaattggattgatagaatggtggaatagcctgttaaaaactctgctgcagcaccagctaggtggcaatgtcttgcagaattgggacaaattctccagaaggctgtatatgctctgaatcagcattcaatatatggtgctgtttttaccatagcagaattcatggctccaggaatgaaggagtgtaaatgagagtgacagagttcactattacttacctgtagtgactcagtagcaagatggttgcttcctgttttcatgactttatcatataatatgagatgtactgaatttgtttcatagtatttacgtaatcctaattttacatcatagtatttaagttaggggatatcaagaagagtaaacattactcaatgactttgcttcctctttctgggaagggattagtgcaatttttggtgtatacaggatagttgtatcctgtcaggcagaattatgaccttgctattgtgtttatttgaaaattaaatatggttttaaaagatacatataggtgccacattgacacagaataaacttataatagctagttttatgtgttggcttgactaggccatggagtgctcagatatggaaacaaatactattgagtgtatctgcaaggatgttctagatgagattgatatttaagttcatagagtgagtaaagcagattgttctctctaaagtaggtaggccttatccagtcaattgaagacctgaatagcacaaaacggttgattaagggaggactcctcttgcctggcttcctgagctgggccattggtcttttcttgcttttatattcaaatggaaacatggattttctcgggtattgagcttgccagcctttggactgaagcttacactatcaggtctggttctcatgcctttggactcaaactagaactaaatttcagcttttctgtgtctccagcttaccaattgcagatattgaaacttatcagcctccataatatgtgagccaatttcttgtaatctctctttctctctctctccctctctctctctctctcaatattgagagcagtatacacagctaagatagtcatggaatggacatgatgactctattactcaatgttatctagagaaacatacgatgagcaagaaaggataagaaattggctcacaccatccttatagaggctgagaagtctcaatatctgtagttggcaagctggagacacaggagagattaaatgtagttccagtttgagtccaaaggcatgagaaccaggagagctggtagagtaagattcagtccaaaagctggcaggctcaatacccaaaaaagacaatgtttctatttgaaacattgaaaaggaatcctctcttaatcaactttatttgtgctattcacctcttcaattgattggaaagggctacctacactagagagaacaatctgctttcctcactccatgaatttaaatattaatcttatctagaacatccttgcagatacacttaatatcatttgtcagcatatctgggtacccatagcctagtcaaatcaacacataaaattagctattataagttcatcccctgtcaacctggcagccatgtgtctcctaaaaccatacttaattgtcaattaaagaaaatagcaaggtcataattctgcctgatgtgatacaactatcctgtggcaaccaaaaatgcactaaccccttccctagaagaggaagcaaagtccttgagtggatgagggctgcctactttgaatatacatggatgtgtataaatacacatttttttctgttcctctagataaccttgactaatacaatcatcatgttcattccctgactatcttagctgaaacagagactaccagtcagtactcttattgcccccgatttgtttattgaatgtacttgctaaaatccaaaaaatacaaatttacttattgtctacatcaaatataatgcaatcactatgggagtaagtactttgtatctctttttacatcacagaatagattgcataacataaaagtgatgctcaacaattacttgttaacctagttttgattaaaacattctgtagagttcaaaaggttctatttttgcatatatgttccctttgtttttataaataaataaattatattaacttaaaaataatggatataatggctttgaaaattctgagactcaccagatggcaaatgatgctgaaatgaataaatagctttcaagcaaagatagaatccagggcactgccaggaaagtatggtccaaaattgtagccaaaaagataactgtaaaattttccatatgttgcaggaagatcaaaggttgtgctttggaatgccatttagttagacatacggtcctctaaaatataaagtatatgatatacagataactcaatcgaacaatggaacctgcaggaagctcacagcattgctctgcagcctcctcaacaaaagttcaagaaagagaagggcatgtttctgaaagtattactgagttaccctttgtgtatgagtgaatcttagtaagattcatagtaaacctacaaaaatttgaaggtaaattacatatgtaaaaatattgataatttaaactgaataagccagattcattttaaagtgggccacccaagtttctttaagcagatagcaggctgagtaaactactcagagttaaatatgttctaacttttatgaaaaagtaggctatttcaaaggataggactgagaccagacggtggaatcaagaaatagccattgattggtaggaataggattaaattcccctcaaaaaaaaagaaaaaattaacattttcccagctagatttcagaactctcattgactgctgacttctgtatgtctccctttttcctctattaagtccgagtgcctatgatgattattctatgcctgtctcatcattttatgatagatgtgtgaaagataggtaagttgtttctttagtttcaaaggtcttcaaatcaagacaaactgtactcaaggagttgtatttgcagctagacctgatttaaatgacaagattctagacttcaaactaatgctgtgatgagatgaagctttggtagacttaggatacaattagtgaggtgtgtgcattacttggagccagagagcagtctacagtaaccggtctgtatctatctgcctatttatctgtgtctctacaagtgcataaatgtgtgtgtggtgtgtggaggggagtgtatgtatatgtgtgcttataagttcatggatgaattacaaagctttcatatgtgcatttcagtttactcagaagttagcaaatttatttttggacattttaacctctgtattactatgaaaagatccacatttccattttcatgtaatctctttctttctccctctgtcacacacacacacacacatacacacacacacacacacaccccacactccaaacaattcttcatttgtgtagatttgtgtattaccctcttcttggttttgtgtctctaaattatttacttaaatattaagttagttaatttaattgtgttccccctctataatttccatatacggtttacctttgaaccatataggtttgaactgcatgggttcacagatacaaggattttcttctgcctctgccatccctgagacagcaagatcaatccctcctcttcttgtgcctcagcctactcaacatgaagatgatgaggatgaagacctttatgatgatccgtttccactcagtgaatagtgaagatcttgtaattctcttaataacattttctctcactttctttattgtgagaatgcagtgtataatacatataacatgcatgacatatgttaattgtatatgttattggaaaggcttctgatcaacagtaggctattattatattaccagcagttaaagtcaaaagtgatacagtgatttttgacttcatagaggtcagcaccctaaccactgtgttgttcaagggttaactgaaaacgcactggattgcatgagcataagataataatgagaccttaactactttccagctgaggtaggggaatttaaattctgcataatatctgctgtcaatagatttgcccagtaaagttttgtatcaaataagttctaagtcttatttcacatttttatctcagtttctaaatctgccattattacgttggatttaggagcaaaatccattataaaaaacctgttctaacaagaagactgttttttggtagtctcttaaacttcatattgggtgaagattatgctccttgaggataagattcatactgtaacaattttctatatcctccacaatgttttgcagattcaataactatttaatgaattaagttaaatttacctatactcttacaagtctttctctcataaataaccttctaatccgcaattcctctaaaacatacaaaaaattgccaatataaaaaagcaagaaagaaggtgttaaccattttgtcattcaaaatatgactcattctttcttatacaactacctttgtcagcattcttgccattggactgtctagcctttgacactgttatatcatggcttgtcgttagagaaggtaaagtttggaaaaaagaagcagttacgtaaagcaatgttagaaaatccttgagtttcccttagaattttgtgtcttctacgtgttttctatttcacatagattaagtttgcagagttgtgtcataatttcatgagtgtatctgtcaaagagccctttgaaggcctatttaatccaactaagaccattttttcttgttttaataccattaaacttgttctctctttgataactgagggaaaagagaaagacattccatataatacatcagatgcctaagtgctttggatagtcataagccttttctcctatagcttcctaattagaaatgcctgctctgcggagttttcttaagttttccaacttgctccttccattttataatagtctattgaggaagactattatcaaataaaaatcagaatgatcactggacacctattttagccttgggatttatatcacaattccctaagacttcatatttccagaaaagaaattcaaactaaagctcacaattactattattatggtaatcctgataagatgtacattttaactaaaagaagttcccactattttttttctttctacttttcaataatccttgggaccttagtaggagtgtgcaatagtcttgtggtgtatttttagtttaaaagtctatctgattaccacttggtagatattgtccaaactcacttttgaatccaagtgtttttacccttatataatttttttaaaagagtatttgcttgtttctattatactataactattggagctactaggaggccttttaaatttcaacaacaaataggcagaatggagactaactgaagggttgatgggcttaaagaaaataaataacctaacaaaggctaatggcaaaaccaacattagaaaccaagtcactttacttgggattagtggataccaaaatgtgctttctcggaagcagcactttacaaggaaacatgaaaatccacctttgttgtccttcagctaaagggaataaaatcgtgtactttctgtaattttaaccttgttataacagatgctacagaaactcaagtggaactctgactgccttgagagctgaataaaatgcatcccaccatccattgctgctgcatcaaggtattaaaaagagagacagaaggaagaggcgagagaggcacaagttcaacagtgtgagggacttggacacaatgggagggagaaagaaataaatgtctaaatgtcatggaaagaacagacaatgaaggcatatgtaagaggcctgctaaagctatgggacctcagaagcctatttgtaagaactacaatttagaataaggaacttgcaatacaatgcctgaccttcatttccttacgtgcctcaatcttgtcaaaacctttgattgatttttgtatgaacatgaattactgctacaatactcagttgaactacatgaatttctcaaagcagtaatacagtgctatagcgtagcttaacattgtttaagtaatatggtttgcttatatttaagtcatttctaagggacccatgcaaacacagtcaggagatctatttctgatgtatttccaaggctaaaaacaaaaaatgctgttaatgcataaacagtcaaaaagctacacattgtggttttacagggacttctatttctaaagatgatggttgcatgagggcctctgcctttataagggaaatgtgtagattttaactagctctgtattataatgtttgtgttttgaaaaagaaaagcatgtttctgcactaaaaaataaattcctaatcaaacctttaaagttaacatttagaacagggacagaaatttctattgtttcctaagtgttttgttgctgttgctgtttagatttaaatcattttttagaagttttactgaggcataattgatataaaaaattgtacacctttaatatattcacttggatgagtttggacatgtgtgcatacaccaataccatcatcacaaccaaggtactgaacatacttattcacctccaaaaattttcttttgttcttttttaatggtggtagtatatttttaagaattcagcctttgagcagggtatgaaggaccttcaacaacaaatgcaaaagtaaatgagctaagttcatataaagggttagctctcagtgagatattcaagttatgatcatatcctcaagaggcttgtaaactgactgtgggtttccagtttggttattcacagataggccttcatttgctcattcacctattcattcatatagccactcattcattctcaagaagaggtatttgtccatatctcaccatgtggatgagcagatggtcagttctcacttcttttgccattaagtgtgctcaccgttgagctccaggatggtattttctctcactttgcgtcattaccaaagtggctatcaagattccctcccctaccttctttttcttttttcaatgtttaagagctggagttaatttcttgactcctttggtaacacatgccgatatataccactcaaggcctgttggattaaactgttaaatttgtcatctagctaatgttttctcagaaccagacaaattaaacagagtcaattgttgaaattatttcaaaagataaacaatcatagaatggaaataaactacagaaagtagggaacaggagtaactaagtctcctagaaaacatttgcagcagatgttaagtatccagtctcgttgttataaatgaatttcaaagaatctcatgaggagcagctttacaaaattttactgcactaacaaatggcagccaacatctgtagtaaacacaaaatactgtaccatcctttgtatctccttaaattaagccaatttctgcttacacagaaaatctgtctgtggaaaacactgcttagaatttgaaagcacattaatctggaagccacaacagaagtgtgcttcagaaaacttcttaatgtttttcttgtgagttattctctttacgcttttcacattacaatattaccaagttatcataatgtattttctgcactcccagagcaagataagactctagttgttgctgggaactatacattgtctaaatatgggttcacattctctcacagtgattctggaatcatacacacaaatgagatcactgctgtcacatcactggaattaagacaacctctctactcactggccatgtaaatatagatacagtactcaaatcctctgaggcttagctaattattggttgatttggtctacacttaccacattaactatttgaaaagattcattgatataacatgtactaagaacagttcctgactcataatcattattaaggcaatatttaccaatatgtgacattaaaatagatactactattagataataattcatactatacattcaatatttaagcaacagaattataattttgtgaagtaaattttgtactcaaatagaaaatctaattctataattattttctgcaatattgggtcatagaaccaacaaagaatatatgactagcttagacgtatgtatttacttatgtgattagtaataaaattcttcactcattcctaggtttgaatcccagatgctctgtgtagcagctgtatagtcttagacgagttgcttaatctgtctgtacctcgatttcctcatttgtactccaattttcttatgtggtaaatataaaattacttaactcagagctatgaggtcagttttatttgagagaatccagaaaaaaaaaaaacttaacacacatttcctaccattcggcatgcataatacgtactcaaggaaattttagatctctgtacatgattaatatattaaatcctcaaaccgactataaggtctgaaaatgcatgtctttatgtcactgtacctctcattgcacttggcacagtgttgtgaatatatttgtcatttgtatgttctttctaccatacaattctgccactccaattagcatattgtgttggaaaacaattgagtgcttgccttatgttttactaaatttatatggaactacgttgacacttccttgcccttaagatgctgggactcactggttgctttctagttctcaggagtctctatgtgactctgtcctttacacttgccctgcaacatcaccctcagccctagacaaagccaacatcatttttaaaaacctgcaaatatgtctgcaattcactgtatgaatattctcattctatcaaaaccctgacctcactaactcaatggagcaatataggatgataaagtagtttatatgaaagtcatagaaagtttgctttgtttattcacccaaaggtatgtttttaaaggatgaggcttttatctgaaataaataaaattataatttgaaatttcaaataatgtgactaatagattatgaattcatttccaaatatagaaataattaaaatacttgggggtatagaaaaagtgagtgctgtatctattcttttattatattaattttaccctagctgccagaatttagtacttttaacatcaactgagagatttaaggctattgtaattttcctattttgattttcctcttctatttataactcaaagtaatttgataatatacactgtgatgtgtccccatgtatcaaacatttaaaaaatatatttggaaccaaagcaaagatacatatttttttttaatttaatttttttttttgagatgtcacccaggctggagcgcagtggtgcaatctctgctcactgcaagctccccctcctgggctcacgccattctcctgcctcagcctcccaagtagctgggactacaggcgcacgccgccatgcccggctaattttttgtatttttggtagagacggggtttcaccgtgttagccaggatggtttcaatctcctgaccttgtgatccgcccgcctcggcctcccaaagtgctgggattacaggcgtgagccaccgcgcctggcgcaaagatatgttttactaataccacagaggtataatctgctgctatttcttgatcagaagtaaacaagtgtcttcacagcagttgatctaattttcttccccattcattcaatggtattttttgattattatagaatatattgaattagataatgataagtcctttttctttttttttcagaaatggcttctctctgttactgaggctggattgcagtggcattatctcgactcactgcagcctctgcctcctgggctcaaggaatccttcgacctcagcctcccgagtagctgggactacaagtgagcaccaccatgtccacctatataatttttgtatttttttttttttttgtagagacagggtttcactgtgttgcctaggttggtctcaatctcctgggttcacaccatcctcctccctcatcatcccaaaattctgggattacaggtgtaagccactgcacccagctgagaaggctttttattataggttgttcttattgttttatttagttggttttcaaggtaagtttgacatataaggtggtataatgtttaaaggtcaagttatagagatagctagattgaagttcaaatccagagccaagttacttagactctctaaggacttgttttttcccttataaaattaaaataaagtggatagccacttcataggtttgtaataagaattaatatgatcatgatgtcacagagttgcaaagagatactgaaacttggctctgccaaaaaatattagctattgccattatgattgttctccttaatacctaaggcatttgctgacaatcaggttactcatcatgtccttccaggaaaaaaactttaagaatgttgaaaacttaggaactacttttaaaatttaattttcagacctgacataacacagctgaggaagagaggtggtagctgattggggatagatgtagagatcattaatggtataagagtgtgagaatgtgaagcaggataggatatgatattactcatacagatcacaaatacatgtcaaaattatatttatcattcatttaagtaaaattcaacattgttttcttcaaagaagaaattgcgcatttcactctacctatttaactctggaaaattttacaaactgagcatgccattttttagtatgaattcctttatttcagctgccctgctaactttgcatgatgagcagaaaaaaatgaaacagaatggttagttctggaatatgaaaaagtgtccaagaagaggagtagtcttgagaagtagggaacaggatgaagtcactaggggacagaagggtaggagggagtgggaccagacaaacactgagctctgcatgcacacgtaacagtctaaaatagtcatccagcacgcagactctaggtcaagataaccaagatgaattgcaacttctccacaagcaacatgactttgggtaaggtatttaacttttctgagtcttagtttcttcaactgataaataaaaatgatggtcatatctacttcataaaattgtgataactgattaatacatgtaatgaatagtgtttggcatttagcttaataataagacatttcattaaaatattagctacttttgttagctagcaactctcaattttgcctaaagctgaccccatatctagggttaggttttgaaagaagttcatcaccatcagaactaggtctggaaattataaaggaaagcttaaaaaaaaaccagaaatatgtgcaacacctatttacaaagaatccactgggaaacccccattgagcccaggtagatggcacatgtcccctttgggcatgtaactcagttccctgagggtcagtatattgtctttgtttcaaaggtcccaaggcaaactttttaataattgtgatcccactcaatagtcatgttcacttactttgtgggtacatttgtggcatattttaaaatgtgaagttgagtgcatttcacttaaaaaccaaaggcatgtaatgacaacatgctatagaggaaaaattattgatttgtgtaaataggcagatcttgtttgtattctagctccatcacttactaattttgtgatatgggcaatttatatcctatctgagcctgtgtttcctctacaatatgagataatttctactttgaagtactgttatgagggttaaatataaattactttctggtttatgatgttggtatatactatttccatgcatgatagttatttttatgaataagattttaacagtaagccatagaaaaatacaatgtaagactgattcttagaatctatcaaaacaggttgtaaaaatgacttaaacatctagcatggcagtgactaacattttgaaaagcttaatttttccattgagaactgtagcccaacacagtgtctgtgcctcagtgttcctcatcaggaaggataatatctgtgatgcatggactaactctaatgaaaatttttattcttaagacacaagatatttcccagcacagtacataaggtctttgtgctcatgtcagcattggagataaatttctgggaaagaagtagagaaaccgctcatttctatagacatcaaaacaccaaagtaaaagtgaaaataaaggtacgctgcagacttttttttaaatgcctaaactaaaaagtatacctatcaggaaacatccaactcacaaattactttaaatatgtttttaaaacagtgtgcttgttttataaccacagattcatgctatttacctgatattcccaggtggttgctttgtggggctcagtgccatccttggagcaataaaaagcatttcttctacaccagtaaaaaactggctacttctcacataaaccttggagggcttccctcagtgggcttagtgatcagcaaatcatgtcaaataacccttttggttatttttgacataatagtgttcctagcaggcagtactcaagaattcccagattcttagctttaaattcaatatactctcttgtattaaaagtcaagctatttatccacagtagttcttaggtccacgtttcattttacacatatatgtggatgtaacagctttttccttagaactttttaaaaaaatggaattcagtaaaagtcctatatttgtattttctatgtgccaagaacagataaccatcattaatgtgagccaaatttgaattgaggagctgaaattaggaggaattgaaaaacacctgaaataaatcttcaagtaatgaaggggaaagtttactttagaattagtgtatcaaaaatgagaaaattggctgggtgcagtggctcacgcctgtaatcccagctctttgggaggctgaggcatgtagatcacctgaggtcaggagtttgagacttgcctggccaacatggtgaaaccctgtctctactaaaaacacaaaaattagccgggcatgatggcacatgcctgtggtcccagctacccgggaggctgaggcaggagaattgcttgaaccacggaggcagaggttgcagtgagccgagatcacgccactgcactccaacctgggtgacagagtgagactccttaaaaataaataaataaataataaataaacaaataaataatttaaaaaagtcattgctttatttttaaaaaagtaatagtttcaaaatgtatacatgtaaaatctaactgggaatactttgtacctacttgtagcccaagattaagtttattctcaattattaggaggtttgcacaatagagtacatatttaatctgtatgactaaaagcctcattgtcaatgtgactgtgtcatcattatcacatttgtgaatctcctgattataactttcacagatggtctatgaacagggttctgggataagaaacttgttgtctgtctacagaggaagctgttttcacttccagatagttctgaatatttgaaagtacttgctgattcagagtcaaattatgtcttgctgtaacatccacaatttctgaacttacatttgagataaaccaagattagactaaaccatgccttcaagtgacagactctcaaaaatgtgatgcattttttttcaaaaaaaactgcacgtccaggatactctacccggagaaaaacatagctctcattaaccttgtccagacattaaacttataagagaaaatcattattttccttgtagccaaattattccgctaaattgtttttaggcaggattaataaacctttactgtaaagggaaagaggctaagatcttaggttttgtgggccatataatctctatacaactattcaactctgctgttgcagtgagaaagcatttatagacgatacacaaatgaatgagtgtgtccatgctgcaataaaactttatttacaaaaccagtctattggctggatatggcttgcaggccatactttgccaacccttggtttacagcctggctagctaaacactgcttgttgtagtaaaatcttgctttttaaaacatatgtctctcatcctagcattgtcattacatgtgtgtggtttattgttgaatatgtaatatttaaggatctttcctatttagttttattgactaaaagctgtttcataattataatacacagacatctatataggtttttattttatcattcaacctattagctaatccttagagttgtttcaattttcatgtgtttgacagatgaacatgtctaaaacactgatgaaaatgttaccagaatataaacaaaaatgaatttttccggttaaaaccattttacttgttagtaatatgtaactattaaccattaaataatttaccaaattattccattacgtaatccatattgctccttcttgtccacaagaatatagtaaggtacattatcaaatacatacctctgactttagtgggcatttaatgtattattagaggatcccaatatctgtctttcttaagaaaattaaactcatccctagtgattatacactttcttcatctaacactataatattaataacatttgaaaaaataatgtctaataattaacactagatttagagtatttttagacaattttctaaaattatctgaaaaatttgaccagaatcattgtaaaattcacatctgagcttatgaaagcccactttattccactctaaaagaacaaaattttgtacttttaattttatcttttaaaatgttttaacataaaggtagtgggagacgttactaaaggaagcttaggtagtaacgtatttgtcgtctcagttaacacaaagaccatagatggggcagatctgcaggatgcaaaaactttcctttttctcacctcatagtagtcatatggctactgcaattctctggtttcatgtgcttacaaaatgtcctttagttaaaaataaaaagaaagagaaagagaaagacaaagaaagaaaaagaaagagaaagaagaagaaaagagaaaaaataatttcttcatgtgtctatttaaattaacaaagacgtgaattgtcccagacctccctgtgatgattaatttcatgtgtcagttttactgggctaagggttgcccacatggctgataaaacattatttctgagtatgtctgtgtttccagagaaattagcatttgaataggtagactgagtgaagaggatcatcctcaccaatatctatgggcatccttcaatctcttcagagcccaaataaaacaaaaaggcagaggaagggtgaatttaatctgtcttcttgagctgggacatccatcttctcttatcctccaatattggaacacctggtctatgttggtaggagtgtaaattagttcatcataaccttgttggcactagggaccagtttcatggaagacagttttttcatggaccgtggtgtagggaagatggttttgggatgattcaagcacactacatttatttatttatttatattattattatttttgagatgaaatctcactcttgtcacccaggctggagtgcagtggcgcaatctaggctcactgcaatctccgcctcccaggttcaagcaattctcctgcctcagcctcccaagtaactgggattacaggcacctgccaccacacctggctacgttttgtattttcagtagagatggggtttcaccacgttggctaggctggtctcaaactcctgacctcaggtgatccacctgccttggtcttccaaagtgctgggattacaagtgtgagcaaccatgcctggcacaggcacattacatttattgtgcactttatttctattattattacattgtaatatataataattatacacctcaccataatgtagaatcagtgggaaccctgagcttgtttttctgcaactagaggtcccatctgggaatgatgggagacagtgacagatgcacacactgcagggggattgcattagatcatcagacatcagattctcatgaggagcgtgcagcctagacccttcacatgttcagttcacattaagattggtgctcctatgagaatctaataccactattgatctgacagcaggcaaagctcaggcagtaatgcaagtgatggggaatagctgtaaattctgcttactcactgctcctactgctgtgtggcccagttcctcaccaggccatggacctagtccatggcccacagggttggggaccccgatctaatgtgacaactctggaaatcagattctataccccctatttgttgttgctgttgttgctgctgttattgttgttcagtgtctaatgagctttctgaaataattttgtagtctgggactactcttcaacactcagccaggcagtttacatctctgccttagccttcacttcctgcttgcccagagcctcaaggccagtcagaggtgagagctttgagccttcccaggtctttactgaacatgtacgcaggcctacacttgggagtagcctcatagatttctaggaatcattctgttggaattttcaaagcccttatggacatctcattctcctgttttacttttaaagctttttagttagcctattgtctgcccaaaatgttatctacaacctcatacaggcaccaacttgaataacggcctttaaatgtttttgacaaatgccattaaggaaaaggctttttcgttaagtgagctcttaggacagaaaaagacatcctggcagtgggatgtttctgaaaaccaccagccaagtcaaatgacagttctctgggaatgaggctttgaaggaaatccagccccattctgtctttccagtggctgccaggctattggtcttcactgtaattatgggctgttaattttcaaggctgcagtggagccagcgaggagaggatgagaatagaatagggcaagttaaaaataccatactgcttgctgttcttaatgagatttttcattttatttatttgtgtgtgtgtatatatgtacacacatacacacacacacacacacacacacacacacacacagtgaatggaaaataaatcttggggccccaaaatcactaagctaaagggaaaagtcaagctggaaaagggttagggcaaacctgcctccaattctattcaaagtcatccctccattcactgagataaatgcatatcggattgcctcctttggaaaggctaatcagaaactcagaagaatgccacttgtctttcacctacctgtgacctggcagccttctcactgcttgtgctgtcccacctttcttggcagaaccaatgtatatcttccatatattgattgatgtctcatgtctccctaaaatgtataaaaccaagctgtgccctgactaccttgggcacgtgtcatcaggacctcctgaggctgtgtcacaggtgtgcctcctcaaccttggcaaaataaacttcctaaattaactgagacccttctcagatattcaaggctcacattttggcaaccatgaagggattctgggtggaggctcccctgacctttgagaaatctcctatcagtgctcggtaccagcttgaactatctttatggctcaaaccaatagaacaatttgccgagacaggcctggaagcaccccctccagagaatcactgatctttcaaaacttggtcaagatctaaagtttattttgcagtacaactccttttttttggagttttactatcttccaacgcaagaaaggcaagtttttcctgctttgatgacgatgaaatgcaggtaactcctttatggagtttgagcttgcttccaacggggaagacaaatgtgagtttcttccttcttctagtaagggaggagaccacccctcatatcgtcttatgcccaatttttgcctccaaagaaagaagtaaaaactaaaaggcagaaatgaaatccacaggcagacagcctggcgccgcaccctgggcttggtagttaaagatcgacccctgacctaattggttatgttatctatagattacaggcattgtatagaaatgcactgtgaaaatccctatcctgttttgttccaatctaattactggtgcatgcagcccccagtcacataccccctgcttgctcaatcaatcatgaccctctcacacgcacctcttagagttgtgagcccttaaaagggacaagaattgctcacttggggagctcggctcttgagacaggagtcttgccgatgcccccggccaaataaaccccttccttctttaattcggtgtctgaggagttttgtctgcagctcgtcctgctacactaggatggtaaagagcagtcttcagcctgagacccatcccttacctaaggatgggtaactaaactgggggttgtcttggctaaagttaagattaacaaccagctggttgtaatttctctttaccattagagcactcagtagttggataagttgtgccatctttgttttgcttaattgtttttgttgttgttgtttgtttgtttctgtttttgttgttgtttcagtctttttgccattgggattgatcaactctatccgacttgatcaaatccaaaggaaacttccaaattatagggaacaagacctctgaagtggctaaatttccacactgtggtgggggagaaaaacagccaaaaaaggggaaaaaaaaaaacagggaagattttttactttgactacttaaggggctttatttacataacaaggccacctttttgctagccaggccaaactgaaagagcaatggctgtcactccatactgcagttccatagctaagggctctggcttctttttttccaccacgacagcttgggtgtgtttcctaaatcaagccattttcggtttgatacttggtacttctgaaatagcagcaatttgttctagctgaattatggtaatgagattttaaaagatttttttaaaggagctcaatgattaaaagtcagcttaactaaaagctaacatccaagatgtgtgtgtgtatgtgtttgtgcatgtgtgtgtgtgtgtgtatgtgtgtgtgtttgtattgaaaaggccttcacatatttttttttttctcctaggaccttgtctctcttttttttttttttagttaaagatttttttttctcagttgactgagttctgttttttgttttgttttgttttgttttatttacttctgctgcctctcctttctcttgcaccctctgctgcttgagggacctaaactattatagtttataatagcctggctttccttcaagaaagcagagaaggcaccagactcctttttggggagaaacctgtttttccttatgaaaccccaagagtgtaagcagataagttcatctcagctcttaaattgcctgcttttgtattgtgttacctgacttattgactaaaagagttgttgcaccaaagcctcctctggtttttaaggaagagtgtagtttacacattggaagtgtcttcgtttaaaaaaaaattttaagtgcactgaaaaagcatcacatggtctagcctcataataattctcccttttgggagattcaggattcagtgtgggctctgcccagagctcagagatctagtcaaaagacaggtatttcctacataaataaaattagtctcttcatataatcctatgacagatttctttttttttttttttctgagacagagttttcgctcttgttgcccaggctggagtgcagtggcgcagtttcggctcactgcaacctccacctcccgggttcaagtgattcttctgccttagtctcctgagtagctgggactacaggcgcccaccaccacacctggctaatttttgtatttttagtagagacggggtttcaccatgttgggcaggatggtcttgatctcctgaccccaagatccgcctgcctcggcctcccaaagtgctgggattacaggcatgagccaccgtggccggctatcctatgatagatatctgtaactttatgtttgatttggcatccctcttttgttttgttttgttttgtttgagacggaggctctctctgtcacccagcctggagtgcagtgacacaatctcggctcactgaaacctctgcctcccaggttcaagcgattctcccacctcagcctcccaagtagctggaattacaggcatatgccaccacacctggctaatttttgtatttttagtagaaacgggttttcaccatgttggccagggtggtctcgaactcctgacctcagatgatctgcccgcctcgacctcctaaagtgctgggattacaggtctgagccactgcccctggtgtagtacatggttttactgcatgtgactagtttacatgcaactagccatgcaagttcagtaacccaaggcggtctataccctgttcaacaagaaccatctactaatgacacttctggaagtctgggcaatgtcaacttgctgtaaaagttcccaaatgctctcaattatcatatgataacaaaggtctcaaatcagtaaattttgagtggccctttactaggaataatcttgaataagctagtactgccctccacaaccacaattaaaaatatatcggtattggttttctcttcagttcaagaatcatgtaaatatgtaatgtagaaaatgaggatttcccatattcccacagaatcacaaagatgatcactggtaatatgcgtgctacatatatgataccaggtttattctactcttttttttttttttttttttttgagacagagtctcactctgtcgctcaggctaaagtccagtgctacgatctcagctcactgcatcctctgcctcctaggttcaagcaactctcccacctcagcctcccaagtggccggaattacaggcacctgccaccatgcccacccagctaatttttttatatttttagtagagacgaggtttcactaagtagaccaagttggtcttgaactcctgacctctggtgatccacccacctcggcctcccaaaatgctgggattacaagcatgagccaccatgcctggccatttttttgtacttttatacaattatatgcttgctttataaaaatgaacttattctacatatatatgttattacattattaggacatgttcccaaatgacatattacattttcatcattcttttttaaaatattttttcgtgagacagtgtcttgctctgttgcccaggctggagtgcagtggcctaatcacaggtcactgcagcctgaaactcctgggttcaagggatcctcctctctcggcctcctgagtagcccagctaagtttaaaaaaaatttttttttggcctggcatggtggctcacgcccataatctcagcactttggaaggccaaggcgggcagatcacttggggtcaggagtttgagaccatcctggccaacatggtgaaacaccgtctctactaaaaatacaaaaattagctgggcgtggtggcaggtgcctgtaatcccagttacttgagaggctgaggcaggagaatcgcttgagcccaggaggcggagggtgcagtgagtcgagatcatgccactgcactctagcctgggtgacagagcaagaccctgtctcaaaaataaataaataaataattaaataaatatatatatatatgtatgtatatttggagagacaggtctcactatgttgcccaagctggttttgaactcctggactcaagcaatcttcccatctgggttcccaaagtgttgggattacaggtgtgagccaccatgcccagacattttcatcatcctttttttttgagacggagttttgctcttgttgcccaggctggagtgcaatgtcacgatcccggctcactgcaacatccacctcccaggttcaagtgactctcctgcctcagcctcctgagtagctgggattacaggcatgagccatcacgcccagctaattttgtatttttagaggacacagggtttctccactgtttttactagaccttgatcacatcaaaaagattgtgtctcttccatttattgtgcagcttgtacacaattgacacaatgaggagctcagcaaaggacgcagagtgacagcatcctcccttcagtggaatggccatgtctagacacctcttaatcactcccgagaagtagggatgggttcggtgtatgagaataagaaacggagcctccagggttgagacaatttgcccaaaacacacctcttgtgggaagtacagttgcgatcccccaggtctcttgggcttgcaggttcctgctctcccgtgggcccccaggagatgttggctgccaagaggaggaggaatcctcctgggcagaggttaacttttgccactccaggatttgcccaccctggggtccctgccaggaatgttcccccagcaccaccctccccatgccgcctcctaactggctgtgtccttcccaccattcagcaaacacatcctacgtccaggaccagccccttcatctcaggaaggctgccatgggactcccagaacccccatggctcctggagccctgagggaatcacatcttgggtggggagtgatttgttttctcatccagtgcaaccttggaggtaacagtcaagaatgtcctgtgatgcgaagcacttattgtcctgacctctggtccagtgcccttcgctctaagcacatagcatccccaggctgttcctggaggcgtgggctggggtttgtagggactagctggaccagctgggccaggggaggcagccatgcccggggcacatagccactgtccagagctgcccccagagctgggagccatcttgcacatggtgctgtgagatgccctccagagaggaagatggaagctgtctccgtgccccgggactgatgaagggcccattccaggcctttgggcacccgggctcactacccttctgggagccctgtcctgtgggccaggacaaaggtgccctcactggtggcattctcagaagctcagccgctccccacacatgcacataggggcgtgcccacaccaagccacgtgtgggtgtctggggacaatgagtcttgggggagggggtgggtcccttccagaagggtctggccaaagtccagttatgaaggtgagctgagatgggctccctcaaaggagccatagtgtggggagccccgggcagagcccagagagaaatgccagccccgagaccgagacacgctccaaggagtgctgccaagagcagtagacacagccgctgaggcccacggggcacagtgaggctgtgggagagggtggcccctctgtggccatttccctgcctgtgctcacatcccctcctcaggcctgtctcaccagctcttgcagcccatgacccacattctgtctgactctccttcctctcctggctacagggatccccagtgcccctcaccattccttctggtctctcctctgcctcccggaactgttccccaggactctctcctgggccagcccttcctgcccctccacatcagtggttccgaaccccggatgcctttgggatcagctgggtacactttaaatccttccagcccagagccctcaggcccaagtcacccccgccagctcctgtgggaccccttggatcagccaaccattttatcatcatccatcatgtcccctgtcaccaagggcctctggcatgttctgttgtccccatgcccaccctggcacccctcacccaccaacctgtgcccacgtcctgccttgagcctgtttcccctcctgagtggtatttcctcactccaggtgggcactggggcagctggcagacatggctgtgagcttctgtcccatccagagggaccctcccttccagattacccagtcaagcttgaccccatggtgtcaccgagacggaccaaaagagggtattgaagccacgcagtcccccgagccccactgagctgcaccagctttggagccggagagagcctgggagactgagcactgagtgctaggtcccttcttcccactcttgagggagaaatcattgtaaccttcccttcctcccactcttgagggccctggggggacacagggcacaaggagggtggcagaagaggtgtgtgcctaggtgcttggcacctagccggggttcatttctgtcctctcaacttggcctcccaaagtgctgggattacaggcatgagatactgtacctggtcttattttttcttttcttaagatacagggtctcaccatctggcccaagctggactcaaactgctgagctcaagtaattcccccacctcagcctccgaagtagctaggactaaaggcatgaaaccaccatgcttggcttgtccaatttcattctacacactttctcggtatttaaacagctgctgttgctcttcattctgtagctctacatcagattcatgctctagtcctgtatatccaaatgatgactacaggctgccggctctgctctttcaaaggcacaatgagcgtagcccatctacaaaactctcccttttccaatccagctttccctcctgcatcacctatctctctacatctggaaccatcggcagctgccttcataaggcacgtcggtctggcattcggaaaaccaccctgtcttgccagagcctcttggtcttgggtagcaaaagctgtatgcaatctaaatcaagctttcaatcatgagaaatcacattccttcttttccctttgtaatatactcatgtgttttttttttttcctttctcaataagcaaattgtaccaccatcttattctgagatgctcctttttaaaagctgtagatcacattaatggaagtgtttactgctgggaatattttccacgtgcaatgatctgtaaccctctttttcttttttttttgagaccgagtctcgctctgttgcccaggccggagtgcagtgacacaatctctgctcactgcaagctttgcctcctgagttcatgccattctcctgcctcagcctcccaagtagctgggactacaggtgcccgccaccacgcccagctaattttttttttttgagatggagtctcgcttggtcacccaggctggagtgcagtggtgcaatctcagctcattgcaagctccgcctcctgggttcacgccattctcctgcctcagcctcctgagtagctgggactacaggtgcccgccaccacacctggctaatttttttttttttttttttttttgtatttttagcagagatggggtttcaccatgttagccaggatggtcttgatctcctgacctcgtgatccgcctgcctcggcctcccaaagtgctgggattacaggtgtgagccaccacacccggccatgcccagctaattttttgtattttttagtagagatggggtttcatgatgttagccaggatggtctcgatctcctgacctggtgatcagtccgcctaggcctcccaaagtgctaggattacaggtgtgagccactgcgcccagccgaactgtaactctcttatctcaactagctgacattacttcacatcctgttcaatttataaattaagagaggtgccatgggctgggcacggtggctcacgcctgtaatcccaacactttgggaggccgaggcaggtggatcacgaggtcaggagttcgagaccatcctggctaacatggtgaaaccacgtctctactaaaaatacaaaaaattagccaggtgtggtggcaggcacctgtagtcccagctacctgagaggctgaggcaggagaatggtgtgaatccaggaggcagagcttgcagtgagcagatatcacgccactgcactccagctggggcaacagagcaaaacatcgtccaaaaaaaaaataaaaataaaaatgaaaaagaggtgccatgtgtacaaaaatcaatgcatatttatgaactttttttcaaatatattttcacacattttatctaaatacataatacagaagcctgtgtgacttgggcaatgtggccaggagggcctgagactaacacatccacctcggcaaaaggacataaaatatgtcttatggtcagaaaaatcaacattttgtgtatttacttagtttacgaaaagtactgaaaatgctattactagctgaatttgtgatttccttttgaaattctgagttatccttatttttcccattttgtttttgcaccaaggagactgcagtcaaataaaacagatactacacgcactcgtcggggcagccgtactgcagaagcacgttgatgcactcctggctggaggcctgccgggcgtaggtcagcgctgtgttcccgtgggcatctcgggccatgacgtccaccccgtaccagatcaggagctgcgccaggaccacattccccttgcggcaggccagatggagcgccgtgcagccgtctccctccccacaggtctcgttcacctcctcacgggagccatgtgccagcagcaggatggctgtctgcaggtcctcatcagcggtggcccgcagcagctgctggcccagggacagctcagtgcagggtagtggggccagaaagagcttctcctcatatttggaacggatccaccgttctttctcttccctcgtggacttttctgagggttttgtctgcccctggctgctcccttcccagatgctgttggctaggtcattgccaatagatgacataaccttcctgagctcaactggccagtcatccagctccagagatcgcacacgggaaaggcgggtgccaagactgcggtggatacctgagcattcaatacacatgaggactcccaagttcaaactggcccacttaggattctgggtctcacagtccacacagtgggcgttcccacgcatgttttggatcgactgcagggccatggcctcgctctggctggtcagctgggacttgcttttactgctctcgcatgactgcaggctggccaggatctggctctggatggcttggacccatgcatcccgctcctcatacgtcgtggcttcaaagtgccacgtttggccagtggcagacacaatcataaagttgttggtgcttttcttctttaggtgtttctttttattggcatgaggggaggggggtgggttgagcttggggctggtggtgctggagatactggggctgaagcatatggagtcacccagcccgatgtccatgtccttggataggccattgcttttagagctggagatgggtgcgcaggccgatgtggctagggatggccactttcctgggactttgatggtagatgtctgaaggtcaatctcttttttatgaatattcttcatataatcacctaagcttgaataataggtgagcacgccattggaacacagggtgacgtatttctttttccatgtcttcagccatttcccacttcgctttaagagcatgccctgtttaatggggatggctctgccgctcccgatggtgtcagcatgattctccggggctttcctctctttgtctgggtcactccctttctcagatgtaaacaggttggaccagcgcatggaccgcttgcaaacgggcgtgggtgtgttggcagtgggaggaacactgaactgagggtcctcctggctggtgctgggagtcggtggaatggaggaggaatagttatttaaactcccacctccatttcttttcttcataatgtgcacggtggaaacctgtgtggaacagaaggaggaatggcttcaaaaattgggtagtggcttgcagggtcctatagacagctcacaattaccttttaaaaagatacattttctgggccaggcatggtggctcacacctgtaatcacagcactttgggaggccaaggtgggtggatcacgaggtcaggagttcaagaccatcctggccaacatggtgaaaccctgtctttacaaaaaaaaaaaaagaaaaaaaaattagctgggcatggtggcacatgcctgtaattccagttactcgggaggctgaggcaggagaattgcttgaacagggacctgggaggcagagcctgcagtgagccaagatcgcgcgattgcactccagcctgggctacagaaagagagtccataaaaaaaaaaaaaaaaaaaaaaaaaaaaaaaaaagatacattttctgttgtttggatagtatatttactcatactagctcactaactaaacagagctgcagatcagttcttactccagcacattctttttacaacacttaagatgactaaatgcaacatgaaatggggaagatttaaaaaaagatggctttgacttcagcatgaaacagatacaagtgtacgatgaaaatacaacctcaataaaagtgccacttaccgcaaatgagtgtaactgttcatcaggtatgctcaaagatctatctgcatctctataaaataagaaagcgcattacttcaaaaactgttaatatcttagtataatatttgttgagtaaaatactgcctcctgtgtgctttggtgtttactttaccaaagcagtttttacgaattcttctcttggatcctgacttgcagagggtttcctgacttcttctttctcagcacatcatggcctgtaccgtgaagtcttttatatgataaccagtcagaaatgcccgtgagtattgactctccctaacaggccatggcaataaaccaaacatcttttcactcttctaaccacacattgaaacacaagaatgttctacaaagcagtagtagtaaactttaataaatgtaaatgtgattcagatttcctagcttcctttctctttagttctctgtagtatactctcatgatgtatttatgtactttctgttgtttgaatgacaaactcatctgcctttttaagaggccagtctttgatgaactttaaactttgtaaaactaatgcattgtgcctgtgtataaaccagtggttctccaaatgtgctgtgtggacctctcgggatcccgaagaccccttccagaaggcctaagaggtcataactgttcttttttttttttttttgagaccaagttttactcttattgcccaggctggagtgcaatggtgtgatctcggctcatggcaaccttcgcctcccaggttcaagtgattctcctaccccagcctcccaagtagcagggattacaggcacctgccaccactcctggctaagttttgtatttttagtagagatgtggtttcaccatgttggccaggctggtcttgaactcctaacctcaggtgatccgcttgcctcggcctcccaaagtgctgggattacaggcctgagccactgtgcctggccaacactgttctgaatcatactaattaaacctgagaaagctgatgaaaaattttaaaaatttgtgaaagtaatacaaagtcattgcctgctttttcattgacacttgccatgattatataaaagcaaaagtgggtacaatggctggtttctcagcataaatcaaggcagtggtaccaattacattagtagtcattctattcttcactgtcccctacaggtaaaaaacatagcctgaatttcttaagaatgtctttgatgaagcagtaaaaattaatgttgttaaatcttgacatgtctctaatattctgaataagtggaaagttaaccagaagcgctttttttgtttgtttttaaagaatccgtgatttaactgtgaactgaaaaatcacttttttcacagaacatcatttttatttaaaagtacaactgggccagcgcagtggctcacgcctgtaaaatcccagcactttgagaggccaaagcaggcagatggcttgagctccttcaggagttcgagaccagcctaggcaacataacgaaaccctgtcactgtcaaacatataagaaaattagcctggcgtggtgccacacatctgtggtcccagctacaaaggaacctgaggtgagaggattgcttgagctgagatcatgccaatgcactccagccaagtgacagagtgaaactcggtctaaaaaaccagttcaactatcattctcaaaaataaatgaagtgagaggttgtcacttcaagggaaatacgtatttgttcccaatgataaaatttaagctttcctgtggactttgacaaacttgttccttctactgtaggcttggcagcttttcaatacttaaaggtgtgttaaagtaagattggtggttaaactgaaagtgatttttgacacaataaaacataaaccaatatattccaagtaactaatgcatgatattataaatgcaagtagtgagcaaaagatccatttactgtgcaagaaagatcaatgagtactgatggaataaatttattaatatgtaaaatgccaccgtaactaatttaagaaaccaccacttgtgaagttttgatttagtgttaacaaatacccacaaccgtctgaaaacttttaaaatacaccttctactaactacatatttgcatgaggttaggtcatcttattgcttctttttttctttttttgagacagagtctctctctgtcacccaggctggggtgcaaaggcgagatctcggctcactgcaacctccacctcccaggctcaagcgattctcctgcctcagcctcccaagtaactgggactacaggcatgcaccaccacgcccagccattttttgtactttcagtagaggcgggttttaccatgttggtcgggctggtctcaaactcctgacctcaagtgatccacccacctcggcctcccaaaatgctgggattacaggtgtgaaccactgcgccccaccagcttattgcttttttgtttgtttgtttagacagagtcttgctctgtcacccaggctgcagtgcaatggcaccatctcagctctctgcaacctccgcctcccaagttcaagcggttctcctgcctcagcctccagaataggtgggactacaggtgcgtgccatcatgcccagccaagtttttgtaattttagtagagacggggcttcgctgtgttagccaggatggtctcgatctcctgaccttgcgatctgcccgcctcagcctcccaaagtgctgggattacaggcgtgagccaccgtgcccaacctcttattgctgctttaaagcaaattgcaaagaaagctctagagaatccatttgtctcctattaagctcaacatgagagactttaaataatataaatacatgacgcactttttactcaactttttgttgtagaaaagttatttttcaatgaaaaaattctgttaacaatactgttctcaaggaatattttctgttgttataacctgggtcatgggttactactgatatctagttggtagaggccatgaatactgctaaactctctgcaatgcacaagacagtcctcacaacaaagcattatctagcccataatatcaacagtggtaaggctgtgaaatctaaactaaaaatagattttgaaaaaatttcaattgtataattctaccacactaaatatcaatataatcaatataaacacatactctttgagattctcaatcatttaagaattatgagagtcttaaggaacaaagaaaatacaaataatttgcttcgatattttagtaggcacaatacagcttatgatgtctagagctgtgacctaacactgagcttgatatcttgcaaagtacttagctagaataacaagacaggtttctaaaaagctcacctttgtgtgatatgatgaggtatctccaaggtcacactgtggaaggaaaaaaaattcataacaatagatgttaacatttgttaggcctgaagacattttttaaaaggggggcagaggaaactctcctagtggccctgaaattcaaatcttctagttcagaacagtaccataagggcactttgttttcatttctttgttttttacaaaaatatgagaaccaaaatgcaaggaaatatgccgttagaagacgcgtttctgttggtgattacaatatataaataataacagatttccttgttatatgcttttctacccacgaaacctttcgtcccatgcgatttattttatgtatttatttattttttgacccagagtctgtctctcttgctcagactggattgcagtggtgccatcttgactcctcacaacctccaccacccaggttcaagcgattctcatgcctcagcctcccaagaagctgggactacaagtttgtgccactatgcccagataatttttttttggaggggggcggtgggtggagtttcgctcttgttgcccaggctggagtgcaatggtgtgatctcggctcaccacaacctctgcctcccaggttcaagagattctcctgcctcagcctcccaagtggctgggattacaggcatgtgccaccacacccagctaattttgtagagtgaggctcaaaacaactgagggaaggcaaatctcaattctactaataggtctacacaatattagcactttttaaaaagcctgtaacatcagcaggtaagatggatatgtctatagtgcttcaagtagttttcatctctgaaataattttaaaatcacagaatttaaagttacatgctggaaaggaccaatgaccttatgtgacatttaattcaacactcattttacagatcagggaaacagaccttaaaactgacttgcccaaggtcccaccaaataggagcagtttctcatcctaaactcaaattaagcagtggctctcaaactttgctgcacattaaaatcacctgagaagctttaatatctgcctcatcttccacgagacattttaatttaattagtattgggtatggctttgggcatcaaggttcttagtaaacgtttcccaggtgatttcaatcagcagcaaagtttggaatgactgagctggggtgaaaatcagaatcttctgggatgcttttcttcacagaaagatgcctcacatccatcccgattttcctaaaaggcttctcagtgcctagagatagagggaaagtggagatgggaagatacatgtgtttgcagacttgcattttgaaaaaaaccttgcataagtgatctcagcgagttccacctatcccactgacaacagtgcactactgattcatgataaaacatttttcaaaatatcttcttgaagccaatttgccctattaatttgttcaataactttatttcaccaatagtgaatacaccaaatgatcatttctcaaacttgctggtggcaaattaaaacttactatactctcaaaagtagacttctaaaaagtagaataatgaggaaaaaagcacgaaatttgtttcagcaaaattaatcttcaaagctgcttttgaattatatgctaacatatgaaaatctttggaactcagaagaagccagggactctagtcaaagtaatttttgtgtatgtgtgctcagagatttaagagacttagctgactacagacatttagtgattactcaataggtcccaaagctcaggacttgagacagagtttgagtccagtttttgttcgaaacacaatttcctctcaactattgttaaaagggagggaggaaagtgacattattatgagtgtaaactttccacttttaattgaagtaaaagttattgacaattgaattagttaaaaaggctagtgcatttgaaacaaaattgtttataagctagttatgtgtacagaatgaaaagttaaattaaagataaagacattaatattctaaattagcactttccaaactgtgttctaaaaatcaagactaataacccaaggagatgagaataatgtacactggacagcccctgtggagctggtggtggtgttggttgttgttccttttaaaataaacttcatctcagggtgctctcaaagcgcacctttgtggcccaagaggtgctcatgcacaatgggagaaattcaaatgcagatacactgtggtgccagaagaagaaaagctgttccttcctccaaggataatgtccaaagtagtgcacactgatttaggcctatgatgcattgaaaaactaagtttccacaaaaaacattcaataaagggaacctatccttctcactgtgttcaacattgtctaaaggcataaaggcatcaaaaagatacattgtttctgggattgcttctttgctaactgatttttccttccaccacgacgtctaagattaaaagagaaactgatacttaatattcagaatctggatatcaatatatggttgactccaatttcttaaactgattgctgaaaaggacaaccaaatgactgaaataattttagaataaaggaatctgtccctcggcagcatagttgtactcatgatattattgtcattgtaagataatgctggatggctgtgctgtcatcaaggaatattgtcgaacacaagctgtattgttgactgaaacgcacagtagatacctgaaggggaagggaagtgtaagtcaaacttatgaaagtgtattattttctcagttaaaatgtcaaatgacaaagcactaagatatgtcttacactccatgaactgcctgagtgtggtatcatgtgcactctatagaaaacccattggaggctctcaacttccagagatgatgtttaagatatgggttataaaatgctgcccttaatatggtacctgtcatcaaacctaacaaggattttatgaattaccgttaaaaataatgggaaaagtctgcttcgcggggcgcggtggctcacacctgtaatcctagcactttgggaggtggaggcgggcagatcacgaggtcaagagatcgagaccatcctggctaacatggtgaaaccccgtctctactaaaaatacaaaaaattagccgggcgtggtagcaggcccctgtagtcccagctacttgagaggctgaaacaggagaatggggtgaacccaggaggcggagcttgcagtgagccgagttcgcgccactgcactccaggccggcagacaaagtgagactccgtctcaaaaaaaaaaaaaaaaaaaaaaaaaaaaagaaaagtttaaaataagatttcatttttttttctgcagcaataaaaagcagctgagaatttctattaattaattaatttatttatttatttttgagacggagtctcgctctgtcgcccaggctggagtgcagtggcgcgatctcggctcactgcaagctccgcctcccgggttcacgccattctcctgactcagcctcctgagtagctgggactacaggcgcccaccaccatgcccggctaactttttgtatttttagtagagacggggtttcaccgtgttagccaggatggtctcgatctcctcacctcgcgatctgcctgcctcagcctcccaaagtactgggattacaggcgtgagccacggcgcccagcccttctattatttatttactacgataaaatgtaatgtattaaataatcctgctacaagagcattttattgcagtgaatacaagactaatgcatttactaaattactaatcctaaatgtattatttcaggtgatattgttacaaaagaagtgtttcagattcagaggctctgtgtgccagggctgctaggccaccaacaagtgaggaagccataggtttctctagtcctattttcttatgtggaggataaaaagagtatcacttaaatattctctcacaccctgaaaacaaatgacaacttaaaaaatctaactttcacttcatgtttaaataagactgccaagacatgactcaaatgagactctcggagaatactttgcattcacttcaaaacttgatcaattgcattctataaatcatctgacctgcacctagccattttcctgctctacccctgctctctgcctagaatactgcttttctctttccttgcttcagcaagctcgactccatctaccctcttggatctctttgtcggcagccacaccaaaaaatgtatttttatacactaattagttgaattcaccactgcttacaagatgctaattcctgcagagtattccccttgtgagaaagtatgcctctccataagagtaagggagggcccttactcttcctacctccagctgctgagcatagaattttgagtaaatccaaaacttcgacaagtgtttgacaattcagttatcatttggaaggtaagtcttactacatttaattacagcaaaaacactactaacagtttactctttataggtattatttaaggtagtcacaaaatagaaacaaatactctaacgtcaggcagcataaatgagagtatgaaattttacaatatttaacaagaaatggaaggggttacttagtagttttaaggtttaatgacaaaaactagaaaataatcgtacctagtaatttagtaagtcaaaaccaaagccttaccatcaaaggtgcagtacccattggatgcggatgcccacgcactgacttcttctgctgtacctgctgcctctcattttaacccattaaaaatactaaagttgttttccttgtagacatgtttcacctccttggttaggtctattcccaagtattttagtttagtttagtttagttttgcagctgtcagaaaaggggttgagttcttggtttgattctaagcttggtcgcttctggggtataacagagctactgatttgtgtacattaattttgtctcctgaaactttgttgaattcatttatcagttctaggagctttttggaggagtctttagggtttcctaggtatatgatcatatcatcatcaaacagcaacagtttgacttcctctttactgatctgcatgccttttattgttttctcttgtgtgattgctctggctaggccttccagtagtatgttgaatacaagtggtgagagtgggcatccttgtcttgttccagttctcggggggaatgctttcaacttttccccctttcagtatcatgttggttgtgggtttgtcatagatggcttttattatattgagctgtgacccttgtatgctgattttgctgagggttttaatcataaaaggatgctgcatcttgtcaaatgctttttctgcatctgtttagatgatcatgtgattttttgtttttaattctgtttatgtggtgtatcacatttattgacttgtgtatgttaatccatccctgcatccctggtatgaaacccatttgatcatggtggattatcttttttttttttttgagatggagtctcgctctgttgcccaggctggaatatgcagtgcggtgatcttggctcactgcaacctctgcctccgaggttcaagcgattctcctgcctcagccacctgagtagatgggattacaggtgagtgccaccacacccggctaacttttgtatttttagtagagatgggacttcaccatgttggccaggctggtctcgaactcctgacctcatgatctgtccgcctcagcctcccaaagtgctgggattacaggtgtgagccaccgtgcctggccggattattttttgatatgccgttgggaactacaaaacgttgctgaatgaagtcatggacacaaacaaatggaaagacaccccatgctcatgaatgggtagaatgaatattgtgaaaatgaccatactgccaaaagcaatctacaaattcaatgcaactcccatcaaaataccaccatccttcttcacagaactagaaaaaacaatcctgaaatttatatggaccaaacaagaaccggtatagccaaaacaaaactaagcaaaaacaacaaatctggaggcatgacattacctgatttcaaactatactataaggccatagtcgccaaaatagcatggtactgatataaaaataggcacatacaccaatggaacagaatagagaacccagaaataaactcaaatacctatagccaactgattttcaacaaagccacctaaaacataaagtgaagaaagtaaaccctattcaacaaatggtgctgggataattggcaagccacatgcgggagaatgaaactggatcctcaactctcagcttacacaaaaatcaactcaagatggatcaaggacataaatctatgacctgaaatcataaaagttctagaagataacattggaaaaacccatctagacactggcttaggcaaagacttcatgaccaagaacacaaaagcaaatgcaacagaaacaaataggtgagacttaactaaagagcttctgcacaggaaaaggaacaatcagcagagtatacagacaaccacagagtgggaggaaatcttcacagtctatacatctgacaaagggctattatccagaatctatgaggaactcaaacaaattacaattacaaaaatatggaaccagcccaaatgcccatcaatcaatgagtggataaagaaaccgtgatatacatacatatatatatatatgaggaataccacctcagccataataaggaataaattcatggcattcccagcaacctggatggaagtaagactattattctaagtgaaataactcagcatggaaaaccaaatatcatgttctctttcatacgtgggagctgagctatgaggatgcaaagccataagaatgatacaatggactttggggacttgggggaaaggctgggaggagggtgagggataaaagactacaaattgggttcagcggatactgctcaggtgatgggtgcacctaaatctcacaaatcatcactaaagaacttagtcatgtcaccaaatgccacctgttcccccagaaacctaaggaaataataaataaataaataaagtacagcatttttctcagcaaacataaaataaaacaaagactaaagttcatatttttcactctccttttgggcaggacaaattttagataggtttttaaagaattagtaacttttttcctttttccgagacagggtctccctttgttgcccaggctggagtgcagtggtgcaattatagttaactgcagcctcaaactcctgagctcaagcgatcctctgcctcagcctcctgagtaggtaatacgaaaggcgcatgccaccaggcctggctaattttttatttaacctttttgtagacatgaggtcttgctatgttgaccaggctaaaaatgaacaaatcttaattaacttaaatatttctaacactttgggcattcaggaaaacagctccatttatgttgtgaagtaatgggaagtatatggcagtggataaactttgaatgaaaatattaaacaaggccttaggagaaaagtgtaatatgcttattatagatacattaatttaaaaaattctctggcttaatataattaattatactcaaattagattttgatttaaacacaggtcctaaatttggattaaatataatagattgaccacaaatttatttcgtctccctccggaagcctcatcagtcataaaataaaggttacacccatgaccagcacagaaggttgacagagataatttttaataaatgctgagacataaaaagtagataaaggagtggtaaataacacagaaacacaactttggtgcctacagaaagtgactggaacagaagcgagccagtttgtcttgcagaactaaaggcaggttgtgaacttacaggcaaatggaactttggaaagtagggtaaaatgtgaaaaaaaaaaaaaagccagcaaggtcagttgcaaatctctaactagagccccaagtccacctgtccttccatctgacaagaaacttagatgtgtgttctctggatatatcaaacctgagaatttctggctcagagataccatggcttaaacctgagatataaagaaaactgtacaccaaaaatggaactccaactttcttcactaactctgtttttcctttccaggcctgcttttactttccaggcagaaaattgggagatccttctcagaagaaactgaaatgtcttcaataaagatccccagataatacactgaggtctcccaaatgaaaagctagtcaggcttctaaggcctcacactgagtgctatcagttaacagaaatcctgcttccaaataaagcaggccagggaccaccacacattggagggaagcctccaagaaaagagatcaaaacaatagaaaaaaggaattgataggaccagtcaaaatcaggagcaaaactttaaaaaaaaatcttaaaacactctcaaaaaatataaaattcaatagaaatagtagaggataaagtcacagaatatcccagaactagaataaaaagacaaactgaaaaaaatacaaggggaaaaattaaaaatcaatgcaggcatattggtctaagcagcctagcatctgaataacaagactatcagtaaaaaagtaacagagaaaataaaaaaaaattctcaagaagagatagtctgcaggtttagtagcctcaataaaatgaaaagatccccaacaagctgttataaaatttcagaaccttagagagagagattctaaaaagcttccacagataactaaaacctggttgtaaataacgtatcacacactggcaatagattcaagaacaacactgtaataagagcacaactgcaaaatgtcttcagaaccacaacatttagattcaacctagaggtgtactctctatcaaagaggagggattttaacatctccacacaggaaaatgtgttcaagtacaactagagacgataacaggacagaaggaaacacagaatctaggactcaggtgatcccacacaagacagcagttacgtgagataccaaaagactttaaagagttagcccagaaaagcagacattgagcatatctagggaaacccacgctatattgaactaggatgacaaaaggccaaagaaagttgccccccacacaaacataaaaaggaacagatgtgttttcgcagatggaaaatatctttgaaaggcatgtgataaatgctacaatacttgggggaaaacagctgttagaaaacaggcaaatgaatatagtcagaaaattagcttcatgctaaaaaataatggatgtgaaagcaaacagagcacccagaggctacttaacgatatttggatagataaactaatgtaggctaggaaaaaagaagatccaggagaattgcagaagtgctcagatttcagaactgtttcagagacaggatgaaggacatggaatgcagaggcacagtgaaaacaccatatgacttagcagtgaataatatttgcagagtcataatcatgtaaatattactgatttaattaaaaagtgtgctacaattggaagaaacacagggagaaacataagatcatggtgtagcggggaaggtatgcttttacctgctgtgacagaaagtcaatagacagtgctggcaattaacttagctattctatttttgttctttcattaaaaataagattaaatatttaaggcaattttttttttttttttttttgagacagagtttcgctctgtcgcccaggctggagtgcaatggtgcgatcttggctcactgcaacctccgcctcctgggttcaagtgattctcctgcctcagcctcctgagtagctgagattacaggcatgcaccaccacgcccagctacttttgtatttttagtagatacagaatttcaccatgttggtcagggttgtctcaaactcctgacctcagatgatcagcctgcctcggcctcctaaagtgttgtgattacagacgttaaccaccatgcccagccttaaggcaggtcttttgaaccggactattgaaatttaacttaaatgtcagaaatctttaaaaggtggacacgctaaactaagcacttttctggataaatttaatactcaggaaaatagaagagatttagaaaatccacaaaaagaggtccatgctaccaccaccaggtccacattgtaatttaaagaaatcaagagagacatccttttatgtcaaactatcaatttcttaactatttgagtgtttacttacatggtttgtacagttgcttcttcttatttctacaactaagaataaaaaaaaaaaaaaactggtcacttctgatacaaataccataaaataaaagtagttgttaacatcttactgattactcctatgaaaaatgagacaaaattccattaaaaaaaaattttcaataacatataatttaaattatctggcatgattaatttcataagtcaaatctaaaaacttagattttcatttagtttactttttgtttctattacatacaaatgaaagaatcctcatgtacaaaagaaaagggcaaaaaaattaggccagatgaaaaatttagctaataaaaagtttaactgttgcatatatgagccatgatccattagtattctctcattctgcatttacacatagcttactttaattatcagactctaagagctaacagttctaaaaactacttcctgaccagacacctatctctagatgcaacagaatccctgtaagcatcttgaaccacacttagtggttatctactaatatgtcactaaaaacaaaacaaaattaaaaaatggtctttacacaactggaaagtaacctatcttaaatttgttttcttttttgagatggagtctcactctgtcacctaggctcgagtgcagtggcgggatctcagcgcactgcaacctctgcctcccaggttcaagaaattcttcagccttagcctctggactagctgggaccacaggcacgtgccaccatgcctagctaattgttttttgtatttttagtagagacagagttacactgtgttagccaggatggtcttgatctcctaacctcgtgatccacccacctcaacctcccaaagagttgggattacaggtgtaagccacagagcctggcctaaattttgatgttaaaataagtatacaaacctaattggacatggtgtctgcagcacaaaaaaatcatttttttttccctaaaaagaggccagaataataaaagccccaagagggacttgggccatgctttgtttcctacactgcctctgcctttgatgctgggagggccttgtaggcaaaagttactaccactgaagagtgagggacatggaatagcttttcttttactgcttccatgctctctaggtgtgagaagcccatggctctggaaggaactgggaaatacaattctgatatgttttggatatgttgcccctccaagtctcatgttaacatgtgacccttaatgttggagatagggcctagtgggaggcgtttgggtaatggcagtgattccttatgaatggcttggtcccatccccatggtaataagcacattctcattacggtaatttaaaagactgtggtactggccaggtgcggtggctgaagcctgtaatcccagcactttgggaggctgaagcgggtagatcacttgaggtcaggagtttcagaccagcctggccaacatggtgaaaccctgtctctgccaaaaatacagaaattagccaggtgttatggtgcccacctatagtcccaactactcgggaggctgaggcaggagaattgcttgaacctgggagatggaggttgtagtgagccaagatcgtgccattgcactccagcctgggcaacagagtgagactccatttcaaaaaaaaaaaaaaaaagagtgtggtaccttcccccttcccctctctctttcaccgtgtggaaccacctgcttcccctttgccttttatcatgattgtaagtttgctgaggccctcaccagaagcagatgttaaagccatgttggtacagcctgaaaatctttgagccaattaaacctctttttgttataaatcacccagccttaggtatctctttatagtaatgtaaaaaatgaagacaaattctaaccagaaataactgactcaagatgggcaaagtctactcaaactataaaaacaaaggttacaaactcccgtgttttactgtgctgcattacttcgcacactattatagaaccctcacttgtattcttgctgtttaagtcaactggaaaacttggctgtgtatggcttgttggcaaataaataaggatttaacataacattaagggaaataagcaggagtagggcacgtttaaatttacattacatcgaatgaaaaagttaataacctaaaacttttgagtagcatgaacttggatgtggtaaatgaatgtggtcagaggactgtgtaagaggaggcccaaatcacagattcaatccctgatgataaacaactatgttttttaagttgtttaaatgaaaaccaagctgaagcctaagttctatcattcatctttaaagtgtactttttggagcaagggaaaagggattataaataaagataaatccattaattataaataaagataaatccaagaattataaagagaaatccatgactcctccatcacatcacaaattaattgtgttgataaaaagatggcaaaatgtataaacaaaaaggttacacattttcactaacatcataacaactaaaggaaagtatatcacatattcaaatgagacaagtgaacatgtgaaaaggtgaaaaatttaaaccaatatgagtttttctaaatactttctataacctgatcaaacaagagattttattctttctcttggcggaaaaaacaatgtcgtctcaccatctgtttgagagttcctctggaatattgtgcttgcctctggattggcagaagggttaaactccaaagctatatgcatagaggaagaaaagaaaaaaagatgtaatcattgataaaaatttatcaactcatttattcgactgctgcatttaggctatttcactatctctactttgattcttatccattgaaatgaatgtatagacataagatagagccaggcaagatggcacatgcttgtagtcccagctactcaggaggctgagatgggaaaatcacttgaacccaggtcaggaagttgaggccagcatgagtaacacaatgacaccctcctttatttaaaaaaaaaaaaaaaaaaagaggtaaattttggctttgagttgtgtaaaatcaactttgcataaaataaatcaagatagcagtaagttttaaaagacagtctattttataggcaaaatataagatgtattctagagtttttaaaatttttaaaaagtaaattcatcatatctgtcacttccatttcattctgaggacacagaaccttagttctcttgagtagctgtcttccatagtcatgtgatatctctaagttttcatttcttcattagcaatacatagggagaacatacacaggccttatttgtattggaaagggccaagtgagacatacataaactgtgttgtaatcctaaagaatgacaataaagagccatttttgggctctcatccaacactacccatctactaactggtgtgtaacatccatcaggctttccgaacatcaccaagcagagtataagtttacacaagtacttacatgctttgtgtataaaggtacaatcaattaattcacataatgcatttgtttattctaaagcaatccttaaatatcttgaaatgtgaagatagtacttccaagttacaaagtcacactcataatgagtcttaattatcctacctctttaaaaattaagagcccgaccaaagtttaaatagaagagctataagacatttcctctacagtgatgaaatctctggcatttaaatgaaaccaataagccaactggatttaatatgtttatgatgcaatgttttctattttgaaaatttcagtttttattcaagaaccatattattacccagaattacttttacttagattcatctctttgcaaaattttagaggcaaaccaactaattgttttctcttttctaccggctcccatcccctgcctctgccagcagtgtagagactaaaaaactccaactttctttcctttttttttttgtgagacggagtctcgctctgtcacccaggctggagtgcattggcgtgatctctgctcactgcaacctccacctcctaggtccaagcaattctcctgcctcggccttgtgagtagctggaactacagtcatgcgccactacgcccagctaatttttgtattttcttttttagtagagacagtgtttcactatgttggccaggctggtctcgaactcctgacctcaggtgatccgcctgccacggcctcccaaagtgctgggattacaggcgtgagccaccaagcccagccaaaactgtaactttcttatctttgaacaagatgctattgtcaggaggggaagggacaaagggggagccatggcaacaaacactctaacagggaaggtctgacattttaacctgcaatctttatattacacattaaaagtctacgttgacgtttcatgtcttttgaaagttttgaccatgaaccaatccccacctctcttttagaacaaggaggtaaataaagtctgttaagtcaccagaataaatctggagacacattttctgttaaagtaagaattttaaagtaatcagagcctcataggtaaactcctttgagaaaccccaaacacacacacacaaccatttttctgcagccccggctgtgacatttcacacctttcacaattattttaagcattctccttttttctttttccttctgtgttcaaattacagttagaagaaactaagcagcttctatcaaggtgacttaaagcagcccattaagaataccatatagcctctcccgtggcaacctccattctgattttaaataagaaatccccaaatatttgaataggaactgtcctgagatttggctactttaacaaaggaaacaattaggcacttacctggttccttcacttaggtaccatctggataggtacaaagaaaaaataagatgggtactgaaaagttgggatatttgagtttttattgagaaaaggaagagaatagctcaaagaagcctaaacaaagtcccacaggataataaacagagctacagacactgttgtctcaccatctgtttgagagttcctctggaatattgtgcttgcctctggattggcagaaaggttaaactccaaagctatatgtatagagggagaaaagaaaaaagatgtaatcatttataaaaatgtatcaactcatttattcaactgctgcttattcgacaagagccataaataaatggccccatgccagcctgggagaatgagatgagagagcaagaactgggcgattgggaggggaggcgaaaagaaactgactggactcggtggggaaagactaaggggtgggaattcaaggcagagccagttttgttcctggccagcccccgggaaagctggctacaagcagaaaggagctcgaagtgggggatgcctcaaagggaaccttggggacagcagcagccaaaggcaaaccgagggtagatggcacctatcacctcctcaccttcaggcatctcccggtcacgaacctggtgcatgtggaggtcctcaccaacttcaacagtcacctcagcaggctgtacagcagcagccatgggcgctcctgccatcctgtcctcagctcctgcctcatagatctcagattcagagggacacaccgacccctgctgctggtcaaactcgaggctgacgctagggtgcacacgacaggtcagtatgttccccatggggcgcctctactgtctgccaccacctgtgcctctgctcacagctttggccacgcactcccgctgtcctaggccgaggctatgctgcacttgcagagatggtcttcccgctcctcgcctgcccacctcacagcgcggccccgggcaccagccctggccccggccccggccccggccccggctagggttgcgggccaaggcccgcaccctgctgcctcccctgagttgacttgtctgggagggtgaagaccagccggcttatttaataggttgtgaacccaacaagcgctgagagacacaacaactgcctgaagagagaacagacggagctccttctccttctgtagtcacctacagactgaagcccactggccccaggtgggagcccaggcatgtggcacacaatgccccaccccccacttcacaatgccctccccgacacctcacagtgccccaccctgcctgccacccctccccaacagctcagaatgcccctgccttggctgccccaccctgtggcttatgatgctgctgctctcctggcccctcgtgcagtgccagtgggactaaggttttcattcatcaccagcttcctgagattttagtcctaagaaaagcacagggtagttcattccttgaagccagcttcctctatgagttctatacaaagcctcagtagagtgggtcccattagcaaccaagttgaacaacttttatttgctgtctgaatatagatacacctgaattgttgactgcttttgtaactaaacactcctctcctgtcttccaacgagtggtcatttttgtccgcaacttgaccacagcaatccctggggccctagctctactctcaataaagagttatggctgtgtgttttgaatgacaccttaggacccatcctgcctccacctccttctccataaaatagaaacctaactggcacctccaagctctgaaatgctgaaacttaccaactcccttttctccccgctatttcttccttccatggcagggactttcaggttttctttcttttactaacaaggcactaagcatgattttctcatacaaaatcgagagccataaagtggcttaccacagtcctatttcaataaagatgaatactcgacatctggcaagtagtgtgtgcctgacagtgtccccactgtgctatgctcatttaaccctcagaaacaatctcatgttacagattttacagaagttgttgagatggagaaggtaagtaacctccccaaggtcacatgactgctaagggtggggccatagtttgatcccaggtagtctgaattccccaattgcttaagcatgagtatcagaaagtatagcagtctgttttcacactgatataaagaaacacctgaggttgggtaatttttaaaggaaagaggtttaattgactcagtttcacatggctggggaggcctcaggaaacttaacaatcatggcagagggggaagtccttcaggaaacttacaatcatggcagaagggcaggtccgacttacatggtggccgcacagagagtgggaacatgtgaaggagcaactgtcaaacatgtataaaaccatcagatctcagctgggcacggtggctcacacttgtaaccctagtactttgggaggccaaggcaggtggatcaactgaggtcaggagtttgagaccagcctagctaatgtagtgaaatcctgtctctactaaaaatacaaaaattagctgggtgtggtggtgcatgcctgtaatcccagctactcaggaggctgaggcaggagaatcaatggaactcaagaggcagagactgcagtgagccaagatcatgccatggcactcctgcctggacaacagagcaagactccatcccaaaaaacaaaacaaaaccctataagatctcatgaggacttactgaatatcacaagaacagcatgaggataactgcccccatgatccaatcacctccccctaggcccctccctcgacacatcaggattatggggattataattcatgatgagatttgggtggggacatggcaaaaccatatcagaaagtaaaggtagaagtcaagcttggatgggaaatgacattgtagattattattattattattattattattattttgagacgaagttttgctcttgttgcccagtgaaattgtttctctaatttcattttcagattgtgtcttgtagatgtatagaaatacaattgataaatgattctggctattaaccttttatgcttcaaccttgctgaacactatttttttttttttttttttttttttttgagacggagtttcgttcttgttgcccaggctggagtgcaatggcgtgatcttggctcactgcaacctccgcctcccgggctcaagcggttctcctgcctcagcctcccaagtagctgggattgcaggcatgcgtcaccatgcccggctaattttgtatttttagtagagacggggtttctccatgttggtcaggcccacctcagcctcccaaagtgctaggactacaggcatgagccatcgtgcccagccagattcgtatatttttaaaagaattttttttactttttattttttttttaagacagagtctcactctgtggcccaggcagtggcacaatcattgctcactgcaacctccacctcctgggtccaagtgattctcattcaagtgcctaagcctcccaagtagctgggattacaggatcccgcccccatgctcagctaatgtttgtatttttagtagagatggggtttcaccatgttgctcaggttgatctcgaactcctgacctcaggtgatccacctgccttggcctcccaaagtgctgggattgcaggcgtgagccaccactcccgaacagaacaacatttttttgatgtggattttaaaatgcctccccttctttcaacattgattaagtcccttctacatgccaggcactgtatgtgtgaaatagtcccaactctcaatgagtgtaggcagatacacaaacaaaggcttaaggaggtcagttttctgagaccatactgctggacagtatatgaacctgggatacaaacccacctctatttgacctcaaatttgatgctggggtggttttaattttattctgggaatttcagtcattcaaccataaaaaggtgaaaagtctctgtcagatgtgcgtgtagtggtctgtataataaagactgaaggaagcaacccaaccaattaagagactttctctaaaggcagagtaatgctaagggcagtggcagtgacaaaagtggaggaaaaagtctgtgatcatttgggagacagaataggaagtgcttggtcatgagatgtgaaagaagaggggaagtagaaggaaaacagagctgctcaggctctgctggggaagactgggtgtgtagcagtgccttcctcctggccgagaatgtaggaagagaaataggtaaggaggaaaagatagttttttactctcagtgtcacattaaaatggaactctctggtcaaaagttgaatataaatctctgtaggctaagtccatttgtgacatcccaacatatgttttcaaaaataacatacacactaaatcaagccattaagcgtaactggggaaatttcctaaaatttacatgctaaaaaatcaccatttttcatttattactttcatggagcaactttgaatctatggttacagcaggtgaggcaccttgtataaaataaagctaatacatgaaataaaaccatttaaaattctattgttctcagagaatggagaaagcaattgaagccatgggtgtggaggtgactgccttgagaagttgtgtatagtaaggagaactgggaagaaagaagacctggagaatagggtgatttgcacggcattaagtgaagcttgcaaaagtgagcactgggagtcaagagacatgtatgaatcagaaatggctgctcctgtgagttgttagaaaggagatgatgccttcttttcatatctataacagtagcacctagcacagtgcctgttcaataggtactcgacatgtattatcccaatgcagagtcaaattttgccaggaaggcaggaaagctacaaattagctatggcaacttagtgattgggcttgggtgtgtgtgtgagcgagctggatgtcaggcagtgggcaaagtagtgaactggaggtgagaaaacaatgacacaaactcagggcttctcttcccaagtatttggctgagaagagagatgtagtattaaagggagatatgtggtaaaggaagccttttatttcaagattcaacaaaagcgtgagtatacttctatgttaaagggaaagagccaatagagaaaacacatttttgaggttagaagagaaggaagaactaatgcagaagggccccaaaaggcacaggtgcgtgcaatccggatcagggacagattagctttggattcctacaaaagcaagaagggagaaaggaccatgtgacactagagatatttctggtaaaggaaaggtttaggaaaatatcttttgatgacctttattttaacataattttttttttttttttttttgagatggagtcttgctctgtcacccaggctggagtgcagtggcacgatctcggctcactgcaacctctgcctcctgggttcatgccattctcctgcctcagcctcctgattagctgggactacaggcacccgttaccatgtccagctaattttttgtattattagtaaagacggggtttcaacgtgttagccaggatggtctccatctcttgacttcgtgatccgccggcctcggcctcccaaagtctgggattacaggcgtgagccactgcacctggctagactttaaaaaaaaaaaaaaatactgtgggaaaaaggatattatgtatagaaaagtctacacttcttgatacaactaactaaaaaaagcctgatacactaaacaaaacccaaataatgtcttccctaaaagtgggtaacttgaaaagcaattcgagcaaaaatcaaggagttcaattataaataagtatatcaacaaagtgaaagatgggtttaatttttcccacaaaaagttaaaagaaataacagcagttttagaggaagaggaaaaaataataagaaaattatatgcagttgcaaaatgtgtgactatttacaaactctaacatataactacaaaacggaccagaagaatcattatcataggaagcaaagggtcatttcaaaaatcagaggagggatgattcatatttaatttaattctgtggaaaacatttaagtaacctttgaggacaaaaataggtgatatgttgaaatgcgggaaaccacagtggaaggaaaaagaattcaagaaagctcagtttcagtaaccagtatctagtaaaatcttcaggacctagaggctacaatctgcattaatagtgtctgaagacctagaaatgtcattaaataccattttggataattcttgtagacttgagatgatgtctatttaaagttacaagacagtgcctgtatttctgtattcataacagaaaacaattggatatggaaaagaaactaacatgctatgccacaatctctaaagaaagattagggaagtttcagcttaaagcaagaataatcacaataaagttttacaaccctttgcaagcatatatgaaaaacttacaaaaagtttgtaatgatcttttcttaagctaagagaatggaaaaaatgagaaaaattaaattataaaatgaaactttggtttagaggtaagaaacatttgatgacagtcaagagatcagggttgtacagtgtattatgtgaatgttgtgactcattggtttcatcttggatatcataacttgacattttgtaaaagtgatttttcatgggagttttttcaggtgccctataaagtcctgtcccatgagaagtgaataatagtcttccatattcttgagatatcttaatgaatagcatcttctacagtcttccattgtttagtccttggagagacactcattagtgactgttaaggtacctgagttattaggtgcctgtagactatgcccagtgatatgtgcattaggtacatgctccctagctgcgttgacactgactgaagctgtgaggtttcacaatgacatgtcagccaaatacatatgctcagatttaccatttatcaagaggtcttcacactatcaattgtgcaattatcattctacacacaggcagcgataaagggagtaaaaaaacacagccatggatcgggagactaaggtacctccagaggagtccagtgggtccagaagccctttggatgttggtcagaggctcctcttgggcagagatcacagcagcagccaacaggtctggtgaaatccttaagagttctcatggacaaagtttgtgaaggcatcttagacaagatattgtctttgctggttttatgatcctctgcagatgggtctattctcattatctcagccacctttcacttcctatcagttcagttcaggtctctcatgatcccaggcagcagtagttgttatcacgtgagttcattcatatatgtttatctctttggggatggggggacaacttcactgtggacttaattctactggagatgagtgaccccattttaagacaacatgatcacaaattattatcacatatcagcagggcagacaatagctatgacctggggctgaaagcaggtaactccatttattctgcaaacattgtcttgattatggtgccagttgctgtgagggatttcctttccaccacctgtttttcacaaggtttgagtctgaactgctaacattctactgatttctgggtgaagggactgactgcaccatcctagcctgtcagagcattcgccccaatacttccactttaagagttttccaccttgtccagaactacagtccattaatcccctcattttctctcttaagagaataaacaggccaggcgcggtggctcacacctgtaatcccagcactttgggaggctgaggcgggtggatcatctgaggtcaggagttcgagaccagcttcacttacatagtgaaacctcgtctccactaaaaaaaataatcacaaaaattagccgggcatggtggcaggcacctgtaatcccagctactcgggaggctgaggcaggagaatcccttgaactcgggaggcagaggttgcagtgagccaagactgtgccacagcactccagcctgggtgacagagtgagactccctctcaaaaaaaaaaaaaagagagagagcgagaataaacaacccatgtcaagtacacacccacatccctcttatcccaaataccaaacacacaaaaatccaatctgtctccttctacctaagcaattttagatagtcactttctcataattaccttaagctccctgacttgctgctcgtcctttctctggcaaaatctcatccttggatgagcccgactttgtgtttgctcaatgacaccactcacctgaaccagaaaaaatatcaaaaagtggtcagagatatcatcataaattcaaattacttacacaaaaaaattggccctaaatgtttccagaaatcaataaaagttttgtttctccaatgacatcatttcttcagaaacccaacgtgtataacctattttttctatgttcttctaacatttattcaacttctctcatctgatatcttgccaaatcattcaaagagaaaatatatcccattaggcaagagcccaccatattcccatcacctgagaaaatcatatgcacaggatgcacccacctcatctttctctgcctcatcatgtcagaaaaagtaccccaccttttgccacaaggcaaatctgagataaaagatttagatggcctgtaattccagcacttggggagaccaatgcaggcagattatttgagtctaagagttcaaaagaagcctaagcaacttagggaaactgcatctcttaaacaaatacaaaccattagcctagcatggtggtgtggtggcacatgcctgtagtcccagctactcagggtggggagcactgaggtgggaggatcacctgagctggaaggttgtggctgcagtgagccgtgatcacgtcactgcactccagccagggtaacagatattttttaaaggatcttctctgttaaaataatccaataaacaggtggccatgaggctgaggtggctgccgtgcactcaattcctccttaaataaaccaaaacttgactcagtgtaaataataaaaggaaacttaagcttaaccaatcagaaaccaccaactaacatctaactagagaccttccactgtaatgttccaaatgaggccactgctccactttacccaatcaagtattttctttttcttccacattcaccatataaaattcttcccccaccctccctaagcctctctgtgggacctctgagctgcttgcagtctggggctgcctagtttatacatttctgaatgctcaaatatattttctaatgtttcaaagtggctctggtgtaggaggttgttggtggagtgacccgagagtatacaggaattgagggcatatgagatctctggactctgtactccattttgctgtacactcaaaactactctaaaataataatatatctttaaaaatctataactagcacgtagcccttttcaagcctccaactggttggagccagttcgattaaagctcagaagaaaaactggttaataagctagttctgacccaactggcaagaagcagcaggaaagacccaggccaggggagcatattgcacatgcatgcaccaggaaactggaggaagcttggaggccctttagcctggtcctgagcccgctgaaactgcagttacaggcacagatgcctggggcaccaatctgaatctgccaacatccaaggccacatgaacacaaatgcgcagtctcctctgcgatcggtagctaaggatgttaggccatgattggactaggatgggagatgaactgagaactctggattctgtaggttgttgttgtctcttcccacccccaagcaacaagtgatgaacacacacacacacacacacacacacacacatcctgtagtgactaacaggatctccctccaggggatttgcagaaaggggagcagaaaacatcccaggggcctttcacagctacttccttgagccccctttcagactgctgtctagacctgtcgcagcccaaacatcatcaccctgatatgcagaagctggcatccttacctgaaattcaacaccaagaaatgatctcttctactcaacactgatagaaatacctctaagcaacgtcctcattggcaggggtggagtggggagtttcttaaaaagggaggcctctgcctaccacctagagaacctggaaatttccatctgtgccacaaagtccaaatcactagccactgccccagtgtatggcagattagaacatctctccattagatctgggtttctattccattgagtgaaatggcttttctattacaggaacagaataagggttcaaaagggtcttacaactgaactccagtgtacagtctgcacagacactaggcttgtgcaaatatgacacagcgaggccccaggacccttaagccagctgaatgtactgagtttcaggaaacagtgagatacattcagcaaaacagtgggcttcatgctgaaagaagtcactccaagtaaacacacatcacacacacacacacacacacacacacacacacacatacacacacccgcagacaccctagtggccaataggtcctctcaccaaaaacctgtgatcaggagagcagaaagcctcccaggggtccatcactgccctttctggagccccttatcagatggccagccccaggacagcactgtctgatcctggtccagtccaaaccgccatcaccctgtgatgtgggagctggccacttcaccagaacctctgtgtcagaaaaatttctcttccttttaaaatgatgagggggaactttcagacagtgtctgattagggtgggtggagagaggggcttcctagaaagtcaggcagggcagggctgaagccctctgggttaactgagtgcttttgatatgaaggcaggtaagactggacaggtgggggtgttagtgaggggatggtgtagggtgtgctgaagaactccacttgagctctgcacaccagggaaaatgaccataaaacatcccatcttcactgctcagagaaggctagatctgctgtgagctagaaagccatgtgggggcagctgatgagtcatcaaatgggagaaatctgagagccatgtgttccacaggcctctggtccttgttcaggcagcagggcactgtgacatgtggctccttggccccttccagccaccaccttgattgcatgctgcagggaaagagactgaagaccaagaatggggtcttgctcaccatgggatgatggctcagtacagagctgagctatgtatggcccaagaggcagaatgtggggatgacccaggctgagctgggggatccaactgaacatgcacttgctaagaagctgtgggctatgatgccttgggaccccagtctgggtctagaattgtagcaaaacaggctactggtaaaagttcttgggaagccaactcacttttgctgtcatccatgggcaaacaaaccaagccccaccacttcccactccctctgaaagcctcctgcccctctgatcgaccacaccacaatggtgtcactctgtaaggcacaggtagacaaggcatccagccatgaacactacagggcgcacacatgtccagaatacactggttcttgttgagactccactcttccaactcagacagaagctccccaatctcctcagccactcccaacaactggaggtctgaaaactttcatgcatgccgctatggtctaaaccactcgtggcggttttcattttcattttcctgataatcagtgatgctgagcacctttccatatgccttttcaccaactggatgccttctatggctaaatgtctattcaaatccattgcccatttacaaatctgcttttttgtgggcttctttttttctctttttttttcctatttatttatacaagttccttaggtattttggatattttttaaaatgattttcaattccactgcccagttataattttttttttttttttttttgagacggagttttgctgttattgcccaggctagagtgcaatggtgcgatcttggctcacagcaacctccacctcccagagtcaggcaattctcctgcctcagcctcctgagtagctgggattacaggcatgtgccaccatgcccggctaatttttgtatttttagtagagatgggttttttccatgttggtcaggctggtctcaaactcccggtctcaggtgatccatccacctcggcctcccaaagtgctgggattacaggcgtgagccactgtgcctggccaattatcccttttagtgtttttttggggggttgggggaagaacagagactcactctgtcacctaggctggagtgcactggtatgatctcggctcactgcagcctccgcctcccaggttccagcgattctccggactcagtctcccgggtagctaagatcatgggcacgcaacacatgcccagctaatttttgtatttttagtagagacagggtttcaccatgttggccaggctgttctcaaactcctgacctcaggtgatccgcccacctcggtctcccaaagtgttgggattacaggcgggagccaccactcccggccccattttgtgttttaacatcagtcgacactcgtattttaaaataataacaatgaatggcgctaccttagaacaaaggaattatagatctttctcttgtcctagtgcagacattttgtctataaaatgttattcacagatgaattcatgagaacattactgtgaattttacatccatatacaagtgtatgctcattcatgaatatttcaataaaataaaactaatagcaaaaaagaattccagagttgaagcagtttcaggaaaaaggagttggcagtatgaagtaaaatagcaaaaaaattttttttttaaatgggtatatttgtgtctacaacttttttttaattatagcattagacaatgtgtatatatatacgtatataaagcaatggaagtagcattgttttcatactagtctagaatattaaaatatatgtaatatgtgatcagcaaaataatggccccccaaagatgtccacagattcctagaaccttacatgaaaacggtacatcatgcatgtgattcaggtaaagaccttgacatgaggagactaccctggtgctatggaatgaatgttgtgttccgtcaatgttcatgtgttaaaatcctaaccctcaaggtgatggtattaggaggttaagccttacgggagactctgccctcatgactgggattagtaccttattaaaggcacaagggagcttgttttttcctctcaccatgcgaagacacagcaaggaggaagcctctatgagaaagcaggccttcaccagacaccaagactgccagcaccttgatcttgcacttctcagcctccaggactgtgagaaacaaagttctgttatttataagctacctggtctaatgcatttccttgtagcagcctgtacggattcggacagtgggctcatgtggatgatgacggtgtctccattcaggactaagtaagcacatgagtccttaacagtggaagagaagggggaaggaaagagccacagagacatgtggccatagaagaagggcccatgggatgcaaggttgctaatggtgagagtggagaagagcccaatgccaaaaaatgcaggcagactccagaatgtggaaaaggcgagaaaaaagatcccctagagcctctagagatgaaggtagcctttccaccacctagattttagcccagtgagatccacatcacactctgacatacaggagtgtaataaatttgttttatgccctgacatactggtagtttgttgtagcagcaatggactagtaatatataaatatatatatatatacacacacacacacacacacacacacacaaacactacccccccaccacacacaacataactatctatatatatcctgcccttcaaaactgaatcagataaactacacattagcattaacttagctgggtgtggtggcacatgcctgtagtcccagctacacaggacgctgagaggaaggatcactttagcccaggagtttaagatcagcctgggcaaacacactgaggccacatttcaaaaacaaacaaacaaaaaacacaacaaatctttgattaagctcatttcccaaatttgaagaggaaacaattattagataaagaggagaaaagagaaaggtagagctgctgacttctgtggtggaagcacagacacaggcccaaacatactcctgtcctcctggctttcctgtcccttctcataagggacacaggaacctctcaaactgaaccatggatcacagaaccatactcagaacgcaatacagttttgtctacaattttttatatatctgtgtccctgtctctgcctcccattcccaactcccttactcttgttagaaaaaaatggctattatcaaatatgagtacatccttatatactaatgccaactgatcaccagctggttttcttcttttacaaagtcataaatatttaggctttaacacatcttccaagcaatagaatgttattttccagttcattaacacaaattctatatctaaaatgaagacttcacaagttgatttaaataacatattaacgaaaatcgactggccatggttcaaactgacattttaattaaatgtgatgataggttgagcaacctagcagtactctaaaatgacttttggttatggctttttccatattatgtttaggctgaggcatccctaaatgattcaattgtaattccccttcttaaacatgagatttatctttacaaaataatttattttcttaaaattgcaagttaattctatagttcatgcatacataatctcagtagatatcagctgtatgtgtacacacatacatataggtatttgtatatacacacattacataatttaaaaaaaaacttattagcagggtacaaccacgaagacaaagaggctttgtgtaatgtgatggaaacacaattgcaggacaaacaacaggctgctgtgagggctgtatttaccctttctgatgtaagacttggaaaaacatggatactggatatttaatccccataacagaaaatttagggtgcagacaacttcccacaatttttacagacaatgtcaatagaaatgcattcaatgcagggaatacacagtgtgacagtatacaaaaataagcaggttgatggtttagatttatgagacaagagaaagaaatagtagatgatgtcataattctccttttatggagttatgaaagttcttcattttatataaggtcaggtgctttcaaatgtcaatgagaaaaatatttaaaggaagaatcaaatctaagatgtagagagatctttataaacgtgaacttcaggccaggcacggtggctcatacctgtaatcccagcattttgggaggcctaggtgggccgatcacgaggtcaggggatcaagaccatcctggcccacatggtgaaaccccgtatctactaaaatacaaaaaatcagccaggagtggtgacgtgtgcctgtagtcccagctactcaggaggctgaggcaggagaatcgcttgaacccaggaggcagaggttgcagtgagccgagatagcgctactgcactccagtctggtgacagagcaagactccatctcaaaaaaaaaaaacaactttttttcatgctgagaagatataatcatcaacacattcttgagcacaactatgcacacaggcacttccgcattcacaagccatgctgtgtgcacacactgatgcccctagattccttttttgaagagatggtctcttggtgtgtcacccaggctggagaggagtgttaggatcatagctcactgcagcctcaaactcctgggttcaagtgatcctcctacctcaggctcctgagtagcctgaactataggaatgagccaccatgcccagccaatgttttcattttattgtagagatgaaatcttgctatgttccccaggtgggtcttgaactcttggcctcaaggaatcctcctgccttgccctcccaacatgctgagattacaggtgtgaaccattgtgcccagccaccggattctttattaagaagaaaacttgtttgctgacatgtaggcaatgaattgatgaatagtagttcataaattactaatttacaagtcaatataaatgagttgagtaaacacaaaataacagcataaattaatgaacagtttacgacctcaagtttctttttttcctttaaaacattgctctgacagagactactacttgtccattccatggaaaagtcagaggtggttaaaatgtcagaggtacacttattaacaccttgctgccttttgtgtagcttcctctcagtacttcaccagttgggattgacacacctctccagctgggttcaggagccagacaggagcacacagaacagggaatccaaagccatctctgacaccaaaagcaatgaaaacaaaaataaccaaacatattatcaagaaatgaacaagagatcgatatcaagtacagcaaaaagagaagaaatcacttaatctgccaggctttcattctgacaaaataatttacaacacgcatgtctctatctgacatgtgtgaatagaaaaagaagaggtgacaatagagtagaggattcgtcttccaattgtctctgatctatccaacctttgttacacatcagagagttctccaatttataaataaacaacagagatatgtggcaaccaggacacagagacatactgagagtactgctcagctctctgcctaggcctgattctgatgatccctgacaatgagcactgtgaaatttacagcaaatcagtacacatacacacaaacacacaaaagagatacttcatgggcaaaaagcaccaaagatataaaataaaatgcctgaaagaccataaaacaacttctgatgaaatgctgttttcattttgcagtagtaaaatattcaccaccaaatctacaattagcttaaaaattacaataagtacagtacttttggatcccatctccaattcacaccttatcaacatgtaataatcacactgcatctacaacaaagctggatggactttatgtgctgaatacaacttgcacactaagaaggaaatttgttgaaataatgagattccaaaatttgtatgccatgctctacttcacaagttaaaagaaaatacaatcatttctattttaaaatgcattgaaataaaatacagaaaatacagtattctaataccagttaacattaagagaatatatctctaaaccaaagatcttggatcttctagaaacaaaatcagctggtatatatttggataagaaaaaaaaattaagagatcaagaaaggagagaagacgttcgcacagaatcatctccaaaaatggctttctgacgcattcgaccagttttcaagtctatttgtttttcctcctttggcatcaacagcctatatcaccaaggatatgcaaaataattcaatttgtacattaatcagctaatctagaactggaaatatagtcaatgaaaatacaaagaaacagaaaatgtcaatgaattgcttaagatgtttaagatgacatagcgtagggaaaaaatgatctgataaacaccggaagagttaataaggaaactgaggcatggttccctaacaccacacttcaaaagaacttatagagagaataaaggaataacccttaaaaaaaaaaatctaattttagaaaaaaattgctcaaaagggaagttagggttttatagatcttctggaaagctgattaatttctaagctaaaaaaactatatgaagctttttaacgtagcacaatagataaaagtatgaaaacataaattagaaaaaactaaaaatcataccataagggatggataagttagaatacaggaataacaggccaggcatagtggctcacatatgtaatcccaggattttgggaggccaagtcgggaggattgcttgagcccaggagttcgagaccagcctaggcaacatagtgagaactcgtccctagaacagaacaaaaaaaattagccgggagtggcggtgcactcctgtagtcctagctacttgcggggctgaagcaggaggatcacttgagcctgggagttcaaggctgcagtgagccaagatcacgccactgcactccagcctgggagacaaagtgagaccttatctcaaaacaaaaacaaaaacaaaaacaaagaaaccacaataacaaaaaaacactggtaacaataaaatcatgattacataaagactgtatagaaaaaaaatcctcagaatatagaaataaaattacgtattttacctgtagctatattagaagagagtattcttgtagacaaggatgtctagaaggatacgcaaaaatgaaaacagctaataacactcattatgtcaggcactgtggtaggtagtttatgcacattgtaacaaattatatactacactatctcaaaattttcagataaattttactggaagtcataaatcaatacaacaaaatcagtgttttgcaaacatccactaagcataaaggtatacaaattcccaacccagactgaaaaataattcacataagccacacattagtggaaacctacccatgggagataatacaacataatctaaataaaactttcagagacaaggcatgtggcttctggacagccacaaactccctgactctgctctagtgtttcggccatcaaaagaaagccaagtggcctcaggtctctgaaaaaccaaaaaagcaacctatggaagatggcgtggtatttgaggaatatttgaagtctgttgaaaaatgcatcctgtatttttttcaagataagactcccttgtaatgtcaggtaagtgaagagccctcagagacacatgcacacacaaagaaaaacaaaacgacatagaatgaatcccaccaaaatgtgttatgatggcagaattatgggtgatacgatcttctgtaatatatctttttattaaaaatagaaaaaaagcagacttacccttgattatctatagcctctgacccaagtggtttggaattggaaagcagcatcactcgacttgaagccatcttggcatcaatggtggagtaggtggagatgagactctggaccagctcatgggtgagccccaccttgtcctatcaaggccaccaagaaagggcacgtgaggaaagcacaaagatcctggagagacactggtttcactcagtttctcaaaattatcttagacacatttcctgagaacctttcttaatgccacaaacaccagagaagaaaatccttataacaaagcttgaaatggatccccatctccattaaacttgtccaaagctcagtgagtatataacctgataacctaaacacctagctagaaaaacctcagttccagtgctacaacagtgctagcttttctaacatttttaagtaaccctgcttttaacccaataaaattcaactacagaactaagaaataaatattggaaatccactttaaaataatgaggagaccactgtgattgagaaaaagaaaaagacaaacgagagctggaaagcacactgattttgtagaaacggaaataagccgtgcaggtgccacactggcagcagtgcccgcgctggggccacggatcaaggaggcatggaggacaggactcttctgcttggtacaatgaaaaaatggtattctttttattctacatattgacaatatgcatttgggcctttattataagtacaagagaaaaatcttcaataaataaaagctgagtacattactttttttgattaagaaatagattaggaaagaataatgagagttcagagcaaagactcctgcctcactgatgcctgaaaaccgtggctgccaccaaggtcaacacagacagcgtctttgtcatacagcacaccctcaactccagaaacaggcgcataaaccagctgctccttcttatttaaacagcacttcttttgttattcaggaagaacacaagggtctgggaggaaactgatgtcactcatggcaaaatgttctacccctggaagacaggacccaaaaagccagcttcaactgacaagaagtcagtaagtatctactgttgactggggggttaaaaacgatccacagtccaagggcttaacccatgaccctaaagaagggcattgtgccacactggaacagtggccctctagctacaagaggtcagagaagagggattcggtaacacctttgcaggcctacacatagctggcttacttttaaaacctccagcaaggccatcttcccttgtttggtcatttttcacttttcctgagaaatgaagccatcccaagaatcctatgtgcaattctcgtatgttctacagcaagagaatacctggcatgtgaatttggcttttatttttcaagtgtgctcctcttaaataaccataaagtgacacctgcaggtcacatttgatgtttgtttggatatcctccgggtttgtcaaatcttccatcctagaaaaataaactcaatcatacagcagaaatgaatgccaaagttcctatacctcctttcatgtgtcaatgactcatcacactcttgtccattaagcacatcacttaggaactagaaaatgcagaaataaggaagcaccgttcaccatccagaagaggaaaaggggcaggcacacaactgtgtctctaggctgaaagtgacattcattccataagacaccagatgggagatggcgtccacctggggtcagggaagagtgaagaacacattcagaaaatccatttctcgaagagggtgagcctgtgctctgggatttgtactgtggcttggattctggcaggtggaaaaagggtattccaggctgagaaaatcacagcacaaagaagagcacaaaggaaggaaactgaaggcatgcacgaaggactccagcacccgggcatgaaggcagcatcactgaaaactgaggctgaacgtaggatggggccacatcctgtagtcttaaatgcttccaagtcctcccattttcctaaacatctcataattaatttactcccaaaggcacagcatctttgagcaatgatataagtagacattttccatcaactacacttctacccccactattcaaataggcacaaaataaatcctatcactgttctttttctagcctttttagctttgaaatatatggcccaggaagaaaaagtttacaatcaccttttaactgtctgccaggatataagggtgaaaagtttgccatgagaggcctaaacttcataactgtaataaaatggcccagattgtggatttcttggttttgatattctccatgcaccattccagaaaggtagaacagtttggcaacctaaacattaaaggaaaattaaaaattaaatttcaattaaattctcgtcaatactgcaacaaaataaaagctctaaacaagaagcaatcctaagaagggagacttccagcaaagccactgtcctgaggcttccagagccttgctggattctttcaggacttattagaaccacacagaggcagactgctctgcaaccaagccggggcatccatctaagtatggtgaggagagggaggtgaggcctctgagcacagaaacggttctgtggccgatggaccacagcagtatggaaaggaaggggcagtgcctggtcctgtaactgggagaaacttctgatgtactctattaagtcccgactccaaaacacccagacattgcctggtgcagcaggtacggagacaaatgagatacaccaagaggcccagaataaccactctcttgagggaaaccttccagagactgggaacacatacacaaagggaattcaggaggcaattcctagagagacgtttagtaatgtctcttcagtctttttgtttgtttgtttgtttgagatggagtctcactctgtcacccaggctggagtgcagtggtgcactctcagctcactccaccctctgcctcccagctttgagcaattctcacgtctcagcctccctaatagctgggattacagatgcatgccaccacacccgactaatttttgccttttgagtagagacagggtttggccatattgccctgagctcaaaactcctggcctcaagtgatccacctgactctgcctcccaaagtgctgggattacaggcgtgagccactgtgcctggcctctttagtctgtttttaaaagattatactgttagtttctaacaattatttctcttcctacctggtaaacttctgtccagaacctgtgttttaatcacttctttgtcttcttcagttgcttgttatgcttgaaggagtcgaggtgggtgagaactcccagaattttaggaaagccatgtgcttgacagatgtttagaaactcaaacatttccatttcaaacccaaagctggcatctataagcatcagtacctacaagcacaacacattatttctcgaagaaactaccaaaacagaccacctacactaggggttggcaactggcccacgggccaaatccagcccatcacctgtgtttgtaactaaagttttattggaacatagccacattaattcatttacatattgtctatggccgcctgtgcactacaactgcagagctaagtagctgcagaagatatgatccacaaagctgaaaatattcactatctggccctcgacagaaaagtcccactccagactaaatcaaatgactacacaggcatcacccagacagagaaaccaccaccctctgacttgctctaaaaggcaaccataagacaaggccactaggatataaacatccattttaagaattctaatgcatgagaagtaactcagaaaaggctgggtctaacctggcccttacctaagaaatcctaatttaaagaaatgaagttttctgtaatgtatttttaagccaaataacaggtctctgacatccaaagaatgggaagaaagtgataatcaatgaaatatattaaatacgtacagaaaaccaaccccttctttcaatctcctcacagaaaaaaaaaaaaaaaatctgtttttttgctgggaagtatacaatggaaacctctaacttgtatgttaatttgtataactcaattgctcagaaatatttgaaatagctaccagtttagaattaagtaaaaaaacagaaagattatgatgaatggtagtctataagaaaatataagcagataagaccaattttttttttttttttttttttgagacagagtctcgctctgttgcccaggctggagtgcagtggcttgatctcggctcagcgcaagctccgccccccggattcatgccattcttctgcctcagcctcctgagtagctgggactacaggcacccaccaccacacccggctagtttttttgtatttttttagtagagacggggtttcacagtgttcaccaggatggtctcgatctcctgaccccgtgatctgcctgccttggcctccgaagtgctgggattacaggcgtgagccaccgcacctggccaagaccaatttttaaaatttaagacacttcaaagatgcaaaataatttcagaactgattcctggaaacttgtaattttaatattaaagatagttctgtttgtatctttccatggataactaaaaataacacaaaatggaaacagaaatgcccatccttgattaaactaggaaacatcaaaacccaaaaccacagaatatatgaagttgggcttgtaggaaagcacagctgccactgcagaccaaggcagcaagcagagctctccagcaacactggaccagctcaaagaacaggtggaatatcctcacaccacatctgatgccagagtgccaagggacaagcagctggttgtagggtcaggaataaaagggagcaaacagtccctcagctgccaatctttgccatctaagccagtgtcactcccctaatccacacacgcacgtacacacccaaatccacgtattgtgtgtgcctctgctgtactcaggaggctttgacaacccagagcagagcaatcaacataagctagactaaataaattatggtgcatccacagaatggaatgttatattaaaaagaaggaggcagagctacagtacttactgattatataccttcaagtatattacatgaaaagagcaaagcatagaacagtgtataaaataagctaccgtttgtgtttttaaagggtggcatgtgtgtttatatgtatctggaaggatatacatatacatatacatatatataaaggtctgcagggacctgagagaccagaggttacagcaaggaaagagaaaatgcgcattgtgtgtaccgtgcattacagttagagtgctttaccaaatgtgtgtgctccttttgaaaatcttaagatttacataggcatctctctcaatgatggttaagaggctgggaaggggagcagggagggagggacaaagagggaaaggttaacaggtacaaaaacacagttagatagaataaattctagtgtccaacagcacaatagggtgactataatttattatataattcagaataactaaaagaatgaaattaaaatgttcctaacacaaataaatgataaatgtttgaagtgacggatctctgaattaccctgatttgatcatcacacattgtatgcttctatcaaaatactacatgtaccccataaatatgtacaactattatgtatccataataactaaaaataaaaaaatgtaaatgcatctcttaatatgtatgtatttaaaattagaaacttgctacattttaaataaaagagaaacaaatgacttctaggaactattcaatcatttcaagtatacaagtttagtaatcgttacacaactttacattaattacacttatttttactaatagtagcattacatgttcaaaatttgaatgttatttagttttctgacattacaatggcacaactttaaaatctgtattactttttcctttatattttaggagtcttcctaggccaaagtataaaatctgtagctctagaaaaaactaaataaaaatgaaaaaaacaaggtatctgtcaccccacacttcctaatcaatatggcttatttttttgctaattttttttttttttgagacagaatttcactcttgttgcccaggctagagtgcaatggcgtgatctcgcctcaccgcaacctccatctcctgggttgaagcgattctcctgcctcagcctcctaagtaactgggattacaggcatgcaccacctcacccggctaattttgtatttttagtagagacggggtttctgcatgttggtcaggctggtctcaaactcccgacctcaggtgattcgcccacttcggtctcccaaagtgctgggattacaggcatgagccactgtgcctggccttttttttttttttttttttttttgccaatgtaaaagatagttcatagaatatcagaaatagtgaacattatcatttccataaatgcaagagcatgtacattttccacacgctgagtactgcctgaattttctattgataaactctgaccacttcttcaggcaattcatgtacttactttagcattatcattaaggatgaaggttctagaaccatcaggaacaagggtcccatcttcacacaagttacttaactgctgggaggctctatttcatcttatgtaaactatagataatacctactcacctcaagggtgtatgtaagctaaatttgtagaaagcagttagcacagtgccaggaagggtccaagaagaaatggtacttactatgatatatttgtacatatatatgtatgcatgtaaatgagctcttattagctgtgttcattaaaggttttctccatcctgtgatctgcttttagattttggaacacatttcattgtgcacattccatttgtattattaatatgacaacatttattactattattattatcatcatcaattcaatcacatctactatatccctgataatgaccatgatccttttaataatcacaaaactctcttcccttcatcacggggtaaataacctatcacaatgctgtaagtctccatcagcaccccaggctgcccctgctcacttaccagatctgctactttagccagatcaatcatcatgttaatgtcacacccacattcaataatggtgagtctgcgctttttacctataagtgaaaagatgaaaattttactttaaaaagaccctgaaaaaactctaaccatcaactcttaattttcattttttaactgcatccagtaaaacaccacatacgtttacaggagtgtaccagaagttcatttttataggcaaaaactggtaaaataaattccatcctgtttttcttcctgtgttctaaatttagataatatcaaaagcctacccagatgaataaaagtgctcaaaacagggaaaattctgactagacaggctccacgataaccatgatcttgctgttcagctgcaggccaatgtcttcacctctatcaaaatttcctgtattcccactatcgctaaaaacatcctcaaacataatgcaacagaatatttacaatgataattatttctaaattaaggtaataagaaaatgatcaagaaaatattggctgggcacagtggctcatgcctgtagtcctggcaccttgggagaccagggcaggtggatcccttgagcccaggagttttgagactagcctgggccacatggggaaatcccatctctacaaaaacataaaaatttaaaaaaaggaaaaaaaagaaaaattagccaggcatggtggcatacactactcacaggaggctaaggtagaaggattgcttgagcctgggaggttaaggctgcagtgagctgtaatcacaccactgcattccagcctgtgccacagagcaagactctgtctcaaaaaaaggaaaataaaatatggatgcgccaaagataaagaaaagcctcaatccaactatattactgcaataataagagatttcagagtgtacattgccattctaccactggatgtttgtttcatcttccctcaaacttggaaaggtcaccatctcccaaagcagacaaattctcataggaaaaagagaaaacgcgcacttccaccagcatgtggcttcataagggcaagcatgtgcacctggcacataggaggtacgtgctgtctgttaaatggtgtgttcgcagtgaccaggcctgtcaggcccttccaaggaacatgcttggcaaagccataaagcagtcaggataaggtatgtatcacatccttatctctgggaacttatccttttatgaagttatagctaacttagtaaaagtaagagagaggtaacatgatatgacaatatttaacatgttccactcaagaaaacaacaaacacacgcatgtccctcagatgacaacagccacaccaagtctgtgtctgtggcggcatctcctacctgacacgatcgtcacagggcctctgatctcggtgaacttctgccaggtgaagttccgaatgaggcattatatcaaagtgctctttccaactttggaggccccgtcaccactaccgctattggtggcggctctagtggagttccatcaaccactggaatatgatgcttttgtgtcttcaaatccagagtcctatttatttaaaaaagaaaaaaaaagtaaactcacttttaaaatagagtaaaaggtatcaaccttataagtagacttttttttagtataattacagatatgagtactttagtatattttatagagagtacaacagacaatataaaaatataagtaacttgtcaattattaacttctgacccctatccaaatcaattgctgttcagtaaagatgtaacaagatgacttcaatagtatagagttgaaaattaaacactccttaaatctgactgttttatgagtgatttttatagttttttaaaaaccaaaaggtaaatactgaggcagtgcatcataacagataagagcagaggttctggagttaaatttggctctccgacttactggttgtatgatgggaggtaacttgttttcttgacctcagttttcttgtccataaaatgagggcaagaatgattcctactctggtaaggctgctggaaggatttagttgaataacgtttaaagtacactgctaagaatatcataaggactcactaaataaaactatgttagtattacatattgtaatttttgtattttatattacaactttgtaaaacatatccagagggaaaaagcacacttatcaccatagaaacagtttaaagtttaggaagaatcaaattctataaattcttgtatcttgggcaagaaacaccaaccagtgtgcagatgctggaggcaaggcagcttctatggcaagtcctctcacgttttagtaaaagccacacagcatgcatctccatgtcctttggagctggactagacttgtgaatccaaatgtcacctgtgagaggctcctaactatttaaaaagattcaatggaagaaccatcagactgtagctaaacacacctgtgaaaggatcgagacatccacacagcagactgaactgcaaaagcattggcatttctcttctgggcattttcttcgtctcctagctggagatcctgcagatgccacttctttttctttgcagctttgggtccactgtttttctttctgtgtttcttctggtccttagtctccatagtggctatttaccaataacaagtaactctaacctacaaggaagaaggttggggtaaggaggtgggagaagcattttacaatccaggcaatacccagggaaaaacattaaatttcatttatttctttatgaagacatgatgtatttgttcactgaacaagggtagaaactgcttaaccatccccaatttcatttctctctgttatgctataaattagatgagttacctctgctaaggttacattctatggttaagttactttttactcgtctcaagtgtcaacatcaccagtacctatttctgcaaggatggaaatattctatatctgtacttttcagccatttagccattagccacatgtggttacttaaaatgtacttcagagaaactgaaaaaatgaattcttaattaatttcattctaactgtaaatagtcacatgtggctaccatactggacagctcagacctagacatcgactggactaacgaagtggtttcctaacttaaaccagaacttaaatttcaataaaaaatttaaaacgtttttatgaacttccaataggatcgcagtattacttttagtacctgttgactctaaaacttctaaattacagctcatctacatacaattgaaaaatagcaatatctgtatgtgtgagatatgactggttctagatgatgcctggaggccccatggacttacagagacccttccagtgatttctgaggtacctgggaatctgtggccaataaattggtagtcactgaatctgtgagtttttttggaatatcgggctgcataaaatctgacagcttgattgagaaaaagcggggcagggtgccatttcattcagttaaggtcctgtattcattccgtttaataaacgtttgtgtctgtctatgatgtgctagccactgtgccagaaaatggatatagctatggtctgattgacagaggaaatccaaactagtatcttccgtgccatgcaataagagctacattgcaaggctgcagagggtgctactggagcacagaagtgagtcaaaggcttcccacagacacacacacgagcggaaacaaagtctttatatatcaccatatgtcaaggaacactggccgggagttaggagagctgggcactaggaacgctttgaaactgaatagctgtgtgatttcagaggttatattgcttgtctactatattttactgccgaacttgtactgtttctctcccttttcttcttggtgggaaaagcacaatttggggtcaacagattcggctcaggtctaagtcgcctgccgggaccacgtcgccaggaaacgacgtctccccgacaccttccctcccagtccgggctctctgcagggattcatcccgtcactctcccaacgaccctcgggcacacctcaggcagatgcgaaatatgccgctcctggggagcaaagatgacccggaggaccgggggagtaccttcccacgcgcacgactcgcgatcttcccagcctaccccagcccgcggcacctaacctgttcacaactgcgactccttaggtccgcttggacaccgccggaaacggaaattcaccctcgcgccgactcgccggaggtaaacaaaaaggcagaaaaaaagggaccgccgcctggacgacttgcaggggacagctggaagaaagactcgtcaacggccgagtgctggcgccggcgccgtctgcgcagtgcgttccaccgggtccgcgtccctcccgattcagccccaccccgccctcggaatccgctgcctcagctcctgctgtggcactccccagcagcttgcacctcgctcgcggagtccttgctgaaggccagggcagctgtgcggcctggcgcgggttacttgatgccgtgcaaaagccaggagacacatttggttctggccgccccggagtcaccgtgcccggggcgaatggactatggctggattgggagtccacttcctcctctgtaaagatgacagacgagggagatctcacgttctgggggtgccctatagccctcttttggccagaagcggtggatcacgcctgtaatcccagccctttgggaggccgaggcaggaggattgcttgagcccaggagttcaagaccaatctgggcaacatagggaggctacgtctctcaaaaaataaataaatacataaataaataaaaataaagccagcgtcgtggcggggcgcctgtggtccctgtggtcccagctactctggaggctgaggcgggacgatcgcttgagcctgggaggcagaagttgtagtgagctgagatcgagccactgcactccagcctgggcgacagagcaagacactgtctcaaagaaaaataaataaataaaataaggccctctttttccgggaccaacagactctgagggcagggacaaactgacccagcctaaactgcctcgccttccctgctcccgggaaaggggttttccctgagggaaggtagcatcttgccattttcttcctgcacagctttgccttcccagggatccacccattgccacctgaggaaatgccttggagcccatctaatccccagcccagctacttgggacgcctacagagactacattgtcagaggatgcatcttcctctagtcttggagggtttcttttcaatatgatcccaccggtgcatgcaaggctcaattctacatcaaaaaactaggcccactcctgtcgccgagacccccaggcttcaggtcctgtcacagtgaccttgttatcacccccagcagcccccaggtattcactctgcgtaggctatatactgggtgctgcactagggaggctacctacgtggcgcatgcttcccttatccctgaagagcttaggatgttgtaacttcttcacactaggcctcttacttcttggagatgtcagtatctgggtaaataatccttctaacatccttttggtctcatgaagcccattcttgtcctctgccctacctcagcttccccctccctccatgatcagaccttagaccttgtcaggtccaaggactgcaaccctcacagtatcccactctgaccaccacctcctatctagagcaatggagagactttgtaggtgaaagctgtctttgctactggttctcctatgctccctcgcctggctcctgcaggcggttgacttcaccagggacacagtggccagtgcccagcaggtcccactcctctcaccagctccaggcagttttattgtagagtaactcttctgagacactgctcctttccccagcacctaaggaagtatttctagtaagttccagtggtatagcatcggtgactctcctgacaagcagagggccatggctgggttcctctgatgaggtgcaggggcagggcactaagaggggaggactctcctgagttctctacctgagccctagactagtagctgctcctcctatacttcctactagtctgtgcctggttactccacttccctgttgcaattaacaattccctatgtacacttttcctgttcaaatgactgtgtggcttctctttcctaatcggactctgaccaatacgctatcatttgccaacaactcccaaagttttatcagtgactcagacctctaacctgaactccagctgcctccatgagatatccatttggatgtttaatggacatttccaaagtgatatgccctacagaactcagaatcttccctctcaaaccaactgctcagcagtcttatgatcttagttgatggcaattcagaagtgaattgcaggacacccggtttgtatctgcagagagaactggagaactgcttagtgtggaaaacccacacattttgtttcagaagtgtgtgagtagaaacagttttccttttatgtttgttggatggataatgatgaacctagcaggacacagaaagctaggcagcagtggaactgagaatgaagttatagttaatagcagagaatgaaaaagaaaagacagataaaacattttgaagaaaggacagtaatgtattcccaacaggtaggatttacaggatggagagaagaggcaaagataactacaaaatttctagcctgagagactggtagaaaaaaatggtggtatcaggaacagacaggggttattaagaaaaaggattggatttttaaaataaagaagatctggtgtaaaattatcctcaggaaaactggaaaactaggcatgtacttctctccatcatgcccttgcacagtgcagtccttctgcctgtccatgcctcgcctccccctccctaggattcctcttcctctcttaagacccatctcaaatatcacctagacttgtaagtaatttacatgaaactggatacctgaggtatccctttgaaagtttttaataacaagttactgttatcttttactaagtccaactttatattcgccattttaactagcatcatttctgtttccaagaggtatttggtgtgaaagtgcaactaagtttactgttaatcaagatcagaataaaagaatctaccaaaaaaattaacaagatcccccttttaatgcataatctttcatccatcaggctgtaagttaaatacctaacataaaagaaagctgtatgttttatggatatgtacatatataactgcagggaatatgatttggaaggatgtacacttagagaagactggagtcacaagtggtagtcaagggagtcttcagatttctttttgtatttcaattttgacagaaatacatacatatgtattataattttaaatttttaatgaaaaaaagtatttttccttttttttcttgatctgtcactacattatatttttccaatatcagctaaacatttgcttcccagaaagcttagttgtcttttcaaaatttattcaggttaaaataaaagatttagacaatgaattaaaaatctaagatggtatttgcctactttatacagaacagtacattgatgctgctaaagcaattaaagtataatttttctttttttttttttttttttttttgagatggagtctcactctgtcacccaggctgaagtgcagtggtgcaatctcagctcattgcaacctctgtctcctgggttcaagcaattctcctgcctcagcctccccagtagctgggattacaggcgtgcaccaccacgcccagctaatttttttgtatgtttagtagagacagggtttcaccatgttggccaggctggtctcgaactcctgacctcaaatgatctgcccgcctcagcctcccaaagtgctgggattacaggcatgagccaccacacccagcctaaagtgtgtactttttcttagctcctatatgcagtgctccttccccatactgaatgtctgaatttttatctgagacatagtatttcagatggtcattacttacgggtggtcattaatagttcctccctgcttctaaccttcctctcctcattttaaattaagttacgctacattattgtggattagaaagtacattaatattaagtgaaaaaatatgatctgatgagtaagtggcaagagtgttaacgtatgaatattaagagttgttctgaggcctttttgcttttctgggggttctgtgcttgtggtagaactcttggttattttataaatagttcctgaaaagtgagagagtacagctggaaatcagatttctgatgaataaatcaaaccctattaagagaaacaggttcaagtaattttaaaaccatttgaattttcataaatgttttgttaatgattaattataaaaaaaaacagtgactctagctggaggcttttgtgtgtttgcttttgagtcagctaggaaaaggaagaaaaattcaagcttagtcaattgtggttttcactgaatcttttttaaagtaatgagctggtttgttttcttcatcactatagcaacttaagctagtttttgcttttgatttttatttctcctagagaaacttagcatgcactgctcattagacttgagcatactaaggaatatctgtggtaattaagttaaaaatcagatcagtgctttgtgctgtgtatagttgcagatgtctgcatttcactaatattctttggaaacatctggataccagttaacataaaataactgtttagttggtttctgttcagaatagaaggaatgacttaaaagttcccattgtagtacatacgtcattctatccctagcccttcctccagctttactgagattgataaataataaacatcatgggtggtgtgtctttagtttcctctggtgagctggatgcacagattactttgtcagcagggtggtcttgatttttaggccatgtgtctaatggcatcagctctgtggccgacacctgtgtaccaagcccattcactatctagcttagccagccgtggactcctgctctttgttaaaagtatttaccttcattcctactagcacagttgaccaaagacccagttgatcccaaacactagtaatgcatcaatggagtctaacagagttttaagatgtgtgtgtgtgtttgggggtggggggtgtagagatgggatctcactattgttgtccaggctggtcttgcacacctgagctcaagttctcctgcctcagcctcccaatgtgctaggactacaggcatgagccaccatgcctaaccctctaagactttgggatacaaaaacataatttactttccttcatttctggaataaaacatctcttcttcctccccctactttctgttctgtgcccctgtttgatctctgttggtcctgttcaccttcagccttctctgctgaaggaggaaaggcttggttttataaaaagtgacaatattcagaccacataagatccttcttgcttcattttggattaaatattttaagattttctgattttcttgtatgcatatgtatttacctattatttgactttattgaataacttcaaattgagtatatttgaatgggaatgggcattaaaaagtgctaagctttccctgcctttcagaactttgtatgtatatgtcacatcattttgtccttcacattctccagttgtgctaatttttcccaatccattaagtagagtaccttcctttttggagtcttacttttttttttttttttttgaggcagagtctcaaaccgtcgcccaggctggaatgcagtagtgcaatctcagctcactgtaacctccgccttagcctcgtgagtagctaggaaatacaggagcatgccaccacacccagctaatttttgtattcttagtaaagatgggggtttcaccatgttggccaagctggtctcgaactcctgacctcaagtgatctgcccagctcggcctcccaaagtgctgggattataggcgtgagccaccacatccggcctccttacttaaatatcttaatgtgccttagaatgtagttaagaattttcaggtgacagtatatttttgatagttatctttggtttccaaacccagagaaggaagagtaactggctttttctctgtgtgggtacattgtgtcttattggagattgttttgtctcaagtatcgctgcagactattttattaatgggtgcaactttaaaatttttttttttttcagattaacggtttaggtatcccagtactcggtatttgccaatttctagaattaaaaacatgtgtgtatcactggttaactagaaatttaaaatgaaaatgtttcttctttagcccaggcaatatcacttgcattcacttctatcccctccttgtccctactctgttggctccagggcttcttccactaagctggtactttctttatacctcctgtacttccattcactgaacctttattggttcatagcctacagaaaatgcctgtggtgtgagaggtaatttgtgaaactgcttctcttcactgtttagcaggttgagctctctaaatgggtgtagctgggaaagaaaatttaactttacaaacaagaattcctgggttccatccagcggaacatgtcttttgttatacacacacagtttctgactcatatcattccatgacttatgataaaatggacattctgtttacactgttgtgtggaagcaggggtctggttcctaatttttagtaacatctatttctagaatattaggcttgccatttgaatgcttctgtttgatttatgaatatcattggttccagcagtttttagctccctgctaaatgcaagttaaaatttttaagtttctaagttaaaagaaagtaacttttcctccacttaagaaagcaaggaaaattaaaaataatgtagtgatgacttccacaggctctaaaagagcaatgaaaaaagtgatttatgtgtgggagaagaaatactagttcttaattaatacattgttttaccacttcccgtgaatttatgtagaagtaatgaaaccaaggtttaagtcatttgttcaaactcctgtcagtttagactttttaattgctttgttacatgccattgctttgtaatacttgttatagcagtggtaacagttgagatttgcctgtttgaccacttgcagggcaccgtgccagattccccatgtgcaatgttcctcgcagttgtgacgcccatcgtagga

SEQ ID NO: 230 - DNA, 119218 bp, Homo sapiens
  source 1..119218: mol_type = genomic DNA
gtttttctggcgcactctctgcctttcccacttgtggtcagttcaagcccccaccagccacacatgggctaatggtgctaagtggcatccccactcctctttccagaaagctgcttgtttgggcaagaagagagatgccccgtgatgccgaagagcaagttatggtggaggcctgagcatgagagctctggtcacaccacgccgaggaccggacggtgcccttgcttcctgtgagtggtctcttcgctttctggctggaacgataaccccaggggttgtgaggacagaacctccacctgccatccccatgggcaccgctggtctccagagcacgtcaaggtccttcccctcccagcttctgatcttggagagcgaggcctctcatgctcacatgcatgtgtttaggtgtatatgctgccatgccatgctttaaaaataaaaagtgttttgaataaaagcctctggaacacaactttatttatttacttttttggagacagagtcccactctgtcaccaggctggagtgcagtggcatgatctcggctcactgcaacctctgcctaccgggttcaagcgattctcctgcctctgctttccgagtagctaggattacaggcgcccaccaccacacccagctaatttttgtatttttagtagagttggggtttcaccatgttggccaggatggtctcgatctcttgaccttgtgatccgctcgcctcggactctcaaagtgctgggattacaggcatgagccactgcgcccggccatcttcatttatttttaagatggggtctttgctcttgcccagggtggagtgcagagtgcgatcgcagctcgctgtagcctcaagctcctgggctcaaacgatccttctgcctcagcctcccaagtagctggcactacaagcatgcaccaccatgcccagctgattctatccgtaaagatggggtctcttgtggcctgggttggtctcaaactcctgcactcaagcaattctcccaccttggcctcccaaagtgctgggattataggtgtgagccacacctgtattatttacaatggttctcctacatgccaggctttgtttggtatgtggaaataaaaactgtgatgaataaataataaaccaccttcaaataacattaggattagagctgggtgtggtggctcatgcctgtaatcccagcactgtgggaggctgtgggaggctgaggtgggccgatcacgaggtcaggagatagagaccaccctggccaacatggtgaaaccctgtctctactaaaaatacaaaaaattagctgggtgtggtggcgggcgcctgtagacccagctacttgagaggctgaggctgaagaatcgtttgaacccacgaggtggagggagactctgtctcaaaaaaaaaaaaaaaaaaaaaattaggatgagagtgatctgctgtgaatcctggggaatgaaaaatcaatttagtgttggttttgaatactggcactattttatattaagcaaagaaagactaaatttattttaataaacattcagaggctgagggtggccaaattttcaagccagaccctcccaatgttaatacactgtgcaaagcttacaccatgaacaactgacccggaccactaccattccaatgggagcctctgccttacaataccaggttagatgtctgtgcccagaacccctaaattagttacaactaataatcttctttcaagagttttttttttcaatcttggagttaacaatctgacttatttttcttttatcaaagaagtaggaaaattacaataagaattctagagatctctataaattacagacctatgactcaaaatccttgaaacaatttctctacgaacataagagttaaaaatagatttcagtaaaaccctatatgcgtcttatgtgtacacagtatagctatgaggaacagatcttattttgaggaactttattgttacatttttgcaataattgaggcacaactacctcctgcttttccaacatcttaataaaaaagacaataaggattaacagtgaaattaaaattaaaaaatacaaaagcctaaggttctggagacaaaactgactagagtctatgtgtagccaagttgtgaatgacagtttagccttgcagagtttccttcttctccaattacaatgtgttacagaatttggaagggggtgtctttaaaaacgttctaattcaccccggtcatgaggaggaggaggaggaagtccagctcagcaaggccaagtgcctcggccagggcggtggggtcagcgctgagcgggtcaagagcccgcgccgggggccatccccctgcgctttctatcgagttaaacggaccccacaatatctccttcctctcatgcttctggtttgaaagtgacgagtaaatatgtcagactgtttaaaggaaaacaagcactcattgacaaggccggactactcaggaaggtgtttcaaacaactcccctgctacgcgaatcacagcgctgctgtcgccaacagcgccgcgaagaggctctccccgttggcggaggacccgcttgcacttcctctgggctctggattctaacacacacaggagacacagcgaaagctgacccagaaggcaaacaaagctcaccacgctccggaccgggctgcgcgtcactgttgcagactgcaaatgggacctgagaccaccccgagggccccaccaggagctctctttctcctttaaaacgtggtcatcggcactcatctccggtcacatccgtgaggtctgtgaagagccacagaagcagtacaaaaacagcgacttctttatccagccaaaaaaggagccacaagcccagcaaacactgacacacagcctcgagcactgcgagagagagttccatgctgtctcccgatgagaacgctgtgctaacagggtgacccagaggcaggtttcccctccctcttctgcttctgcatctgccccaagggcttgcgtttaccgggtttgcggaaaacaagccaagggtgagctgcagaggggctcggggctcggggcagcacggcctcgggacgagggccctgggatatgtgactgagccacagcaacattcgggtgccaattaagaggacgcttttcattttcttgtaaatgctaggacacatcccaaaacacactaggcaggatttctcagtagagtgatacacagaggggaccagcttggaatgcaatgtattttaaacacagtgaaagccacctggcaggtagctggacaagtgagctgggcccaggactggccagctcgtatcaacattcacaggctcccgcgggctcccccaggacagcggcatccgagagtgtttactcttctgcaagcacagtcatagaagcgaggggcctcgatgagaatcagacttagggagagcggcgaacaggcacggctgtccaaaggcactggtggagcggcagtttggagaaactcaagattcctccagcgtctgtgggcttcccgaaaggtcagctgttagctcgccaagcagctggggcattaacaaaagctctgctagtggccttgccagctttctgaagccccagaagaggaatgtttctgaaagaaggaaacgctatgtgctgccaactgtgtgtgagcagatgacttgcaggaagatgggagagccgtctgcaaggggacctggtttctgtgtctttgccgttgggttgggcagtgggtggctaaggggagaagagcaccgctgtgtgtgcacggacggagcggcagtcaccgtgggcatcctgtctcactccgtgttgtgctgctgggcatggggcagggtgggaagggctgagcctgctgtaggggcgtaaggtgaatccacacctgcagagctctgcagcccgtcctcagagctgggaagggatcctaggcacggctcctcagcttcatctgagaggcttggactaggggctcttaggaaatcggcacgggagtttgaaaaggcaacgtgctccctttgggaggtggccttcagacactgcggctggggctgcagggccgggctcaggcactgagtttagcagcatcggcgtgcactggatctctacaagctactgttaggcaaagctttcaggttagtctgtctcagggaagacttgtgagttagaaaagccgtctgcaaggccagctggtttttgtgtttctgtcattaaagacagagcgtgtgtacacacatacacacacaacacggtcctcaattaaactgcgtcagaaaaagaggaacgtttctgtaaaagcaaagcaagctgtgtgattaggtgttccgtattcacaacatcatcactcggattttcagtagtttcactcgcccccaggattcagtagctaacgtgacagtttccatgtccttttgcctagagctcgctggctggctggtctgacagcattcctgagccaggtattccagggcacggatccgagaaacccactcaaggaccacacagacaacacacacccaagagtctgaccgacagccgtgggggctgctcaacgacgacaaaccccggggcttcctcgctcactgcagcatgatgtccttcaggttctcctgcaggatggtgtctttcacagcatggaacacgaagcggacgttctcggtgtcgatggcggtggtgaagtggtggaagagtggcttgctgcggttccgtctcttcctgtcgaagcactggaccaggtagcgctggacgtcctccagcctgtgcgggtcgcccctgaagtccgggaagtgcttcttgatgctcacggtcttcaccttctccaccaggaggtccatcttgttgaggaagagaatgatggagacgttgaagaagagcttgttgttgacgatggtctcgaagatgttcatggactccaccagccggttggtgcgcctgtcctccatgaggacctggtcgtactcgctggaggagaccatgaacaggatggacgtgatcccgtcgaagcactggaaccacttctggcgctgggaccgctggccgcccacatccaccatcttaaaggggatcttcttaataacgaagtcatgctccacaattcccttggtggctttcctagccagcaggatatcttgcttactaggaaagtaattctgtaaaatacaggatgaggcagaaatttagggggaggaagaaagaacagagaaaatagaaacaaaaagatggcaaaaagataagaaggaaagagactgacttttgcaacaggttgaaccagaaaccaaaagcaaatttcatttataacattatcaactggccgtgaaacagaaagaatcaaatacttcatttcaaaacgaacggaggctcaccagtctgaggacgaatgctcagaacactcgtgggcaggcccagcgcaaaaccacatccattttcttctccagaggaaatttaccatcttttttgtttccataccagagatacctttttatttttctaactcctaaagcttatagcttccaaaaccttactgtgaattaatttaggttttgaatgtgatgtaaattcaatctgcaatacatttaatgttattcttagacaattctttaagtctttagcgacacacaggcaagcatactcttcactcactttgactttgcactattaataatcctccaggccaggcacggtggctcacacctataatcctggtgctttgggaagtgggaggaataccttgagcccagaagttcaagaacagcctgggcaacatagtaaaaccccatatttacaagaagtaaaaacattagctgggcgtggtgcctcatgctatagtcccagctacttgggaggccgagacaggaggatcatttgaacctaggaggttgaggctacaatgagttacgatcgtgccactgtactccagcctgggtgacagagtgagaccctgtctcaaaaaatcgaaaaacaaaacagaacaaaaaaccaacaaaacacctcccgtgatgagtgcacacaccactcaggcagcttcttgccaaaacaccaaacacggacatgatcatgcctcgatctagaggtctgactaccacccacggggtgtgcaggggacagagaaacatcttcaataacactgcaggggtggaagagcaaagtccacatggtaagaaaccctacaggataaataatccagttactccaataaacaagttgaaagaaaaaaaggagagacatacagattaacacttaagtgatcctgaccaatggcaatgcatgaccttattaggttgttgattcaaactctgctaaaacaaagcaaaatcaacatgaaaacattaatgagacaacagggaaaatctctaaactgactaggttgacattacggaattactgccaatttttcaggagccatacggtactgcggttgtcatttttcgtcttgtctttttgaggtacactctaaaatattctctgcatttgctcccggaggccgggggagggctgctgaaacaagactggtaatcagtgataactgccatgcctggggtttcattagactatttgtttttgagtatgtttgaattttccatgagataaaggaagtcctcctttcactcatgaactcctctgtctgtctcctttatggtgatctgggcaaaggcagtttcctcccctccccactgagacggggcccagatccaagtgagagcgtgccattacagtactattcgtggtaatgtgacagaacaagctcggcctgtcagtccagccaaagtcctcacaacgtggactgctttggtctctggacacgttttctaaccctggagcccagcttcttcgggcgggcgtgcttactcaccagctggccgatccggtccaagttgtccaggaagtacttcaccgactccccctgtcaggaaggaagaatattcacagctcagtctggactgaggaatcctgatgtggcaaatacaagaactgaacagggtaagagcagtggcatttcgcctccgtgtgaatgggaaagcaaaggaaaaaggcagagagtgtccgtgtgttttctaaaataaaaaaactaccattaaagaaaatgtttaatgcaggttctttagctccaaccccaaggttcaaattctggctgtttttcaattttcgctgctgggttttggtgtgtggtgcgatgcaggcccctctgatgggggactctctttccagacatgaaggctggcccactcctggccatgcggccagcaaaggacaggctagaataggattttagattttggctcctgggtacagtcttgcttctgtcgaagatggcctaagggacccaagacattgtccttaaagacaaaacatcctgacgaaaaggagcatctagcaaaacatcttccagtttctagaaagagtccattattccttcccacatttttatgacctgatttatagtagcaaacacaggggaatcttccatttggattgttgtggtggaatgatggccagtcttctcctgcctggaccaatcatcgatacaatctgagacgtgttccatagtgcgaagggccctgcggaatcacccaggaccccgtttcaggaagcgctgagccgccaaatgcgaggcacacacggggcacgggaggagccgggagagcgcaaccaccgaccacagagcagcccgcatatgaacaggcacgcaatgagtcccttcaaaggtagcgtattaaaaaccaattataccactttctataagattccactttgaaccctgctctaaagacagacaccagcaggcggggtcaaggcttccaggctgccctgacatcagggcttgtgggaagagcagtcactttctgtgttctcatggaaatgtacaggggcaaggtcatacacatgtggcgagctgacgcaggagaattttaaggagagaaggccatcagaatggactacgtgatggcgctgaagctcgtggcgttgtaagggatggagaaaggcggccagcacctgctcagtctatctcttcctcctctgtcccagacagactgaggggagaaagcagagaggaagctccttcagggaggagcccaccttcctactttagaacgaaggcctctggatgttttcaaagtgagtgttttgtttgaggggacagaaacacacgtctccccatcccagcactgcctgtgttgagcgagcacacatcctcctcctctgtggcaggacggggcgagcacgtgcacctcgtgaccaccggctctctagagccccaggcagaggcccagctctgcagtagggaaggcatcgggagtgccagggtgaacgtaccccaagggcccggcacgactgacctctcgtgcctgctctctcccttcctcgccaagcccccgtgatgtgggaagccagcgtgaggccggtggggcagccgccttcccgtggctgtgccaagtccccccggtcctctgcacatcatgcctccttccacaccctgacaggaagcagctgggagaagccgttgggtgcactcactccctgatttacgacaagttccttcctcagcgcctctctctcctgcctcctcctgctctcctgccctcccctgggcctcgggaggtgccacgcaagcccaagaagcatcagcatactgtccctccctctcctgtggccacgggctcccccagggagctgagagtagcagcagctcacagcccaagccacccttgcccgtttctaggcaggtggtggcaccaggcacgaaggaagcagaggcagttctcctgcagggttctagctgggtcaggcatggagagtcacagtggcacagatgccccagccagtgctcttatcaccacaggacacaaagccctggacacacgtgctccgcccagatagtacggacgcaaggggaaaagcaccacagagggcacaatcaggacaagctcgatgggaagcagaaaacaggagggacgtttccctcggtgtgagtctaaacacccctcgagtctgcaatcagtcccccagctgcacttcacaacacagcaaacactcactgctgctttctccacgatgactgaatgaggatggctcatttaactcatcacagcatttgtatcactacttggaatgcaggaaaacttatctgtgactctcggtcatcttgcatgagtggcggaggagaggagtcaaatctagtttcatgtcagggcggcctcatctcgagaaacagcccagggggtccgtgggaaagctgccactgaactgtaaggtgccagggactgtgccacaagctctctaatgggggctggaggggagggaagaaggggacacagagcaaccctgtgtgatccagaacgctgtcactcacatccgcactcttgctgtccctgaggtttggtgcactgcggttcaccaacagagactggacaatgcacctgctgattgggcacgcagcccacgggacgatcgtttgcgacggactcctcaagtcttacagcagcagctcattaaaagggccaggtttacaatcccatgcattttcaacactaagagaattcagtcatttctttagagaaaatgcatgtggcagaaactgagatgtccacatgaaattaaccgcttggtgggtttataaagaggcactgtgcctgccaagacgagcccagagtcctctcaacggctgctgcggtcacacgatctagaaacacgagtggatccaaagtgggctctcgggactctccttggtgtgaaaaacctacaccactcaagattaacacaaacttggacttgcggattaaatgaaatgaatttcattaggctggggccagcggccactgagcacacacctgacaggggcctgtcccctgcctcaactgtcccacgaatgtgtctgtcctctcacgagcaacagaagggatgaacctgagcaggggctggtggcagtgaaagaggggttgtctgtttcaagcagcagcagcaggttgatatggggcctgtgcacctgtattgggcacagccgggcagatgtgatgtcgtgacactgggcaggacctaggccgacacacgcccatgaggagaccgcctttctgcagaggcctgcagccttcagcagtttctggaagcacctgtcacccacacctccggtgggagaaagacacacgctcggcttgctgccgctcagaactccgtcagcaccgtcaggcaggcactgcagcagcctcgcccgtcacctctgtctctgcacacagcaagctgccccttcacagacccctgctggcctcacgcacttccttcagctaatttaggaccacgagaaaagagcttcagatcattcaaccctgcacaggaccagaccctcgagatcagtacatgaggggctgactctggttccctcttgtcctctgctcctaattggagcctttctacccacatgcttggttcagttcctgcctgtcaatgtcacagactgacagggtgtgcattaaagacagcccatgtgtgggtcccactggggagtgagaggaaaaggtaaccgtggattggtctcagatgtaagcgtctaagtagggacagatcaaggaccagagagtggttacaaagaaaacaaacaccaacttccagctcctggccagagggccttttaattttaaaccctatctgcccattcaggagctatctcacagttttgttttgttttttttttttttgtttttttttttttttttgagatggagtctcgccctgtcgccccggctggagtgcagtggtgtgatcttggctcactgcaacctctgcctcctgggttcaagcaattctcctgcctcagcctacagagtagttgggactacaggcgtgcactaccacacccggctaacttttgtatttttagtagagacggggtttcaccaggttaaccaggctggtctcgaactcctgacctcaggtaatccacccacctcagcctcccagagtgctgggattacaggcgtgagccacagcgcccggccctgtcttacagtttctgcacttagtgaggttaactctaaaatcctaaagcggggtcattcacactgtgaccgaaaacagggcttgttaatggtgagctagaggattccaaaatctagttcactcacttcaacgtgacaaattacaaagacaaattttaaaactgctgtgtatgaaaagtaacagcaaactatgccaaaggcccaggttttcaatttcattacttaataaataaatattaaagttagcatttgatttccactgaatagagacgctagccaaacaacagagaatctttcaaaatacttttaaaaacagtatctagttccccaaaagaaatcctcattttgaactcaggctttgctcagtgaacgcctgtgacatctcacagggctggcgtgagattaaatgataccacagctgtgaaagtattctggaaaagagatacaacaccacattcatatacattagaaaaaggaagcttttcaagttttaatttgggtacctatgaattgtttgttgctaatttatcatccccaaatattaggtaagaggaccaggcgtggtggctcacagtaacctcagcacgttgggaggccgaggcaatcacttgaggtcaggagttcgagacaagcctggccaacatggtgaaaccctgtctgtactaaaaatacaaaaacagagtgaggctccatctaaaaaaaaaaaaaaattaggtaacagattcactggcagaaatacaaagtgacgcaggcacaagctgtcactgcaggaaacgtctagtaggagaagctgcttgaggaaactgtgatctccacgcagtcaggggctacgcaccggcgaaggagaagagctccgtggctggaaggaggtttccgatacccactgccaaaggaaaagcacaaggcacgaaacaacgcagagtatcttccttttatgtaagaaatggcgggagactaaaacccatattctgcttgcttatatttggaaaaggaaacgtggatacaccagcagcagataaaaatgacttctagggagggagggaatgggggatgggacagagacaggagtagccctctctgagtatgtctgactttggaaccatgctaacatcttccataattaaaaaaaaattaaataaaaaaccaacccctcaaaattgaacccaaattaaagcaaatgaacccaataggacaataaggttagaggcggaacctagaattctggcctcctcctgttttttattttgtttgtttttttgttttttgccagaatgtgaaagtacagaggagctggcccctgactctggccacgctttggcccccttgccctgtgtgtagcctcgtggctgtgcctgtggacacctcgtctccaagcctggcacacagccaccccttggtcacagcagtgagaccccaggaagagctgcacagggtccttggccgtggagcagcctctacaactgtaagctcaggctccgcagggtgtgtcctcggcgtgtgcagggttgctgtcacaggggtgccacgccgggcccctaaagcaccagcccccttgcctgggttcttcctttatgttttcattaggtaagatctacataatagaaaattcaccattttgacatgaaccattcaatggcatttactaccttcaaaatgttgtacggccaccacttctacagcctatcagccgccactcccactgccctggcccagaccctgacaacacgaatctgctttctgtctccatggatttgccggttctggatctctcattggagcgcattcacacagcatgcagccctttgtgtctggttcttttacttggtgcggcatttccgaggctcgcccatgctgtggcacaggccagtgcaacattccattttacggccaatatatatatatgtatattacatgccattgtatggatatgtggtttgtttttccatttgtcagttgatgaacactttgtttccagtttttggccgttgtgaacagtgctacaaacagctgtgtggaagtttttgcttgaatatctgttttcatttcttgagtatacacctaggagtgaaactgtagcatcctatggtagttctttttttattttaaaatggagtctcgccccgttgctcaggctgagtgtagtggtgcgatcttggctcaccgcaacctctgcctcctggttcaagcagttctcttgcctcagcctcccaagtagctggattacaggcgtgcgccaccaaacctggctaatttttgtatttttagtagagacgggggtttcaccgtgttggccaggctggtctcgaactcctgacctccagtgatccgcccgccttggcctctgaaagtgctgggattacaggtgtgagtcactgtgcccggcagtcctttggtaattctgtgcttaattttctgaagaccaccaagctgttctccacggcggctgcacaagtttacattcccatgggccatgtacaaagtttccaatttatccacatccttgccaacacttgctgttttctgatttttaaaaacggtggccatcctactagctgtgaaatggcactccagtgtgatcttttctgggttttctggcatttcctggtgatcttttctaggtggttctatttgtatcatcattatagactgcatgtttgtatgctcccagaattcccatgtggaagccctacctgcagtgtgatggtatttggagatggggactttgggaggtgactgaaggtagggacctcatgatacgatagtgccttcataagaagagaccggagagctctccctctcactccgtcctatgtgaggcaccaggacacagtgagaagctggccgtctgcaagcgaggaagacagccctccctcaccagaacctgatggtgctgccacccagatcctcaatttccaatctccagagctgtgagaaaattaatttctgttgtttaacccacccagtcagagtattttgttatggcagcttgagccgacaaatataattatgaacttgtggattttcatctgtcagaggcaaagatggtgaaatgtaaacaacatgttaatactgggcaatgggtttatgagtatctgttgggctcattcttaaacagtttcataagatgtttaatagttcaaattatagattcagcccttaaaactacagatttagggctcgccgcggtgactcatgcctataatcccagcactttgggaggccgaggcggacggatcacgaggtcgagagatctagaccatcctgactagcatggtgaaaccctgcctctactaaaaatacaaaaaaattagtcgggcgtggtggcaggtgcctgtagtcccagctactcaggaagctaaggcagaagaatggtgtgaacccgggaggcagagcttgcagtgagctgagatcgggccactgcactcctgcctgggcgacagagcgagactccgtctcaaaacaaacaaacaaacaaacaaacaaataatcaaacaaaaaaccactatagatttagattcttcatttgtatcacagggatcatcatagaaaaatgagctagaaagaaattttacagtatgttttaaggtattcccctgcctctagataaaaagcacctagactaggtgtggcggcacgcacacctgtggtctcagctacctgggaggctgaggtgggaggatcacttgagcccaggaggttgaggatgcagtgagccatgattgcgccactgcactcaggcctgggcaacagagtgagacactgtctcttaaaaaaaacccaaaaacctaaataacagggctaggggtggggagagctcacccagtttccagaggcttccaccacagaatctctaaaacccagcaagtgcggcaccaggcatgtcacagttggactgcctgttagctttctactttttggggaaattcacagcagaattccagcctttgtagtagccagaacccaaattccaagtctctttggggctaggacagaggtatgtgtgaaaagttgcaagaatagtacaaagagctcatacagtctttctctagattcacctgttcacatcttctctcatttgctttatccttcgctcgctctctttcaatacacagacttttaaaaatccgtcatcatttgagagcaagttgtttacccctaacaacttcagagggtatgtcctaagaatgaggacacctgcttctacaaccacggcaacttcaggtgctgcttcaggagaacgccgcaaggataagagtattcatctaggatgactgtctcataattaccacgtattagacaccgaggtttatctaatatatacagatacagcattataagaccatttccctcctctagcacagaatttagtatattacttacatgtagttatcatgcctctttagtttcatttaatctgaaacacttgaatttttttatttttttatttttttgagatggagtctcaccctgttgcccaggctagagtgcagtggggcgatctcagctcactgcagcctccgcctcccaggttcaagagattctcctgcctcagccacccgagtagctgggattacagaggtgcaccaccatacctggctaatttttgtatttttactacagacagggttttgccccattttggccaggctggtcttgaacttaagtgatctgcccgcctcagcctcccaaagtgctgggattacaggtgtgagccaccacgcccagcctacactgagatttttgaagaagagggctgcctcccacggcccttggggtttttgcgatgtctccagtgtttaacatgacagtttcgagatgattttccagtcagtgccactccatgcttgctggtctgtgagtgacattccactgtcaacaagagccctgctcctgtttatctcatcgctgtccacatggactcacagacgctgtcattttccaggggctgtaattcatctctgtcctcgcttactttggtgctcaaagtgaagaaagcactgagtctcgccggccctttgcgtttccatattagttctaaagtcagctgtcaatgtctaccctccctgtccccgcaaacacctgcagagttttgattttgaatgaggcctttaattcctcttggtaatgcttataaattttctgtacacaggtgatgcacatcttcccttagatttattctcaggtatgtaatcttttatggtgcttcttaaatggcatctttaaacatttcccattttataatcctttgttgctagtgaatagaaatacaactgatttctgtatattggcttgtgcctagtcaccctgctaagctctgtattcattctaataatagacctgtaggttcttctcaattttccaggtgcacactcacatcacctgtgagccacaggcatggtggtgtgtggcaacaacaacattcagacagaaagcctaccatctttttggccaggagaacaagaggacagagctggggcaaccaggactgccaaggggtaaggtgggaacactccaaaaagaaaagagtcagtgagggagacctcaagttctgtgcataaactttgcctaagagcctggctggcccctgaaccgtatatatgggggcaaactgaaaggggtctctgctgtgatctaagcaaccaccagcacaggcatgaccaagttggcagtttgggtctcaccaagttaaatgtctgctaaagcaaaaatatcaacattagatggatgaacagaacaggatttaagtcttaaaacgacatccataatacccaagatataattaaattattcaaaatatggaagatattcatcatcaggggcaaaaacaatcagaagttatcaactcaaatatcccagatactgggatggcttgacacagactttaaagcagctattataattaggctcaattaggttaaaaatgctcatgttgaataaagatacacaaaatcttatcagaggtcagggaggatccaagatggccgaataggaacagctccggtctacagctcccagcgtgagcaatgcagaagacgggtgatttctgcatttccaactgaggtaccgggttcatctcactggggtgtgccagacagtgggcgcagcgcactgtgcgcgagccgaagcagggcgaggcactgcctcactcgggaagcgcaaggggtcagggaattccctttcctactcaaagaaaggggtgacacatagcacctggaaaattgggtcactcccaccctaacactgcactttcccaacaggcttaaaaaacggcacaccagattacatcccgcacctggctcggagggtcctacacccaaggagtcttgctcattgctagcacagcagtctgagatcaaactgcaaggcagcagcgaggctgggggaggggtacccaccattgccgagacttgattaggtaaacaaagcagccgggaagctcaaactgggtggagcccaccacagctcaaggaggcctgcctgcctctgtaggttccccctctgggggcagggcacagacaaacaaaaagacagcagtaacctctgcagacttaaatgtccccgtctgacagctttgaagagagtagtggttctcccagcacgcagctggagatctgagaacgggcagactgcctcctcaagtgggtccctgaccctgagtagcctaactgggaggcaccccccagtaggggcggactgacacctcacacggccgggtactcctctgagacaaaacttccagaggaacgatcaggcagcagcatttgtgggtcaccaatatccgctgttctgcagccaccgctgctgatacccaagcaaacagggtctggagtggacctctagcaaactccaacagacctgcagctgagggtcctgtctgttagaaggaaaactaacaaacaggaaggacatccacaccaaaaacccatctgtacgtcaccatcatcaaagaccaaaggtagaaaagaccacaaagatggggaaaaaacagagcagaaaaactggaaactctaaaaatcagagcacctctcctcctccaaaggaacgcagctcctcaccagcaacggaacaaagctggatggacaatgactttgacgagttgagaaaagaaggcttcagacaatcaaactactctgagctacaggaggaagttcgaaccaatggcaaagaagttaaaaactttgaaaaaaaattagacaaatggataactagaataaccaatgcagagaagtccttaaaggacctgatggagctgaaaaccaaggcatgagaactacctgaggaatgcagaagcctcaggagccgatgcgatgaactggaagaaagggtataagtgatggaagacaaaatgaatgaaatgaagtgagaagagaagcttagagaaaaaagaataaaaagaaacgaacaaggcctccaagaaatatgggactatgtgaaaagaccaaatctacatctgattggtgtacctgaaagtgacagggagaatggaaccaagttggaaaacactctgcaggatattatccaggaaaacttccccaatctagcaaggcaggccaacattcaaaatcaggaaatacagagaacaccacaaagatactccttgagaaaggcaactccaagacacataattgtcagattcaccaaagttgaaatgaaggaaaaaatgttaagggcagccagagagaaaggtcaggttacccacaaagggaagcccatcagactaacagctgatctcttggcagaaactctgcaagccagaagagagtgggggccaatattcaacattcttaaagaaaataattttcaacccagaatttcatatccagccaaactaagcttcataagtgaaggagaaataaaatactttacagacaagcaaatgctgagagattttgtcaccaccaggcctgccctaaaagaactcctgaaggaagtgctaaacatggaaaggagcaactggtaccagccactgcaataacataccaaattgtaaagaccatcaaggctaggaaaaaactgcatcaactaacgagcaaaatagccagctgacatcataatgacaggatcaaattcacacataacaatattaactttgaatgtaaatgggctaaatgctccaattaaaagacacagactggcaaattggataaagagtcaagacccatcagtgtgctgtattcaggaaacccatctcacgtgcagagacacacataggctcaaaataaagggatgcaggaagatctaccaagcaaatggaaaacagaaaaacgcaggggttgcaatcctagtctctgataaaacagactttaaaccaacaaagatcaaaagagacaaagaaggccattacataatggtaaagcgatcaattcaacaagaagagctaactatcctaaatatatatgcaaacaatacaggagcactcagattcataaagcaagtcctgagtgacctacaaagagactcagactcccacacaataataatgggagactttaacaccccactgtcaacattagacagatcaacgagacagaaagttaacaaggatacccaggaattgaattcagctctgcaccaagcagacctaatagacatctacggaactctccaccccaaatcaacagaatatacattcttttcagcaccacaccacacctattccaaaattgaccacttgatagttggaagtaaagcactcctcagcaaatgtaaaagaacagaaattataacaaactgtctctcagaccacagtgcaatcaaactagaactcaggattaagaaatcaaaaccgctcaactacatggaaactgaacaacctgctcctaaatgactactgggtacataatgaaatgaaggcagaaataaagatgttctttgaaaccaacgagaacaaagacacaacataccagaatctctgggacacattcaaagcagtgtgtagagggaaatttatagcactaaatgcccacaagagaaagcaggaaaaatctaaaattgacaccctaacatcacaactaaaagaactagaaaagcaagaacaaacacattcaaaagccagcagaaggcaagaaataactaagatcagagcagaactgaaggaaatagagacacaaaaaacccttcaaaaaattaatgaatccaggagctggttttttgaaaagatcaacaaaactgatagaccgctagcaagactaataaagaagaaaagagagaagaatcaaatagatgcaataaaaaatgataaaggggatatcatcaccaatcccacagaaatacaaactaccatcagagaatactatcaacacctctacgcaaataaactagaaaatctagaagaaatggataaattcctcgacacatacatcctcccaagactaaaccaggaagaagttgaatctctgaatagaccaataacaggctctgaaattgaggcaataatcaatagcttaccaaccaaaaaaagtccaggagcagatggattcaacagccgaattctaccagaggtacaaggaggagctggcaccattccttctgaaactattccaatcaatagaaaaagagggaatcctccctaactcattttatgaggccagcatcatcctgataccaaagcctggcagagacacaaccaaaaaagagaattttagaccaatatccttgatgaacattgatgcaaaaatcctcaataaaatactggaaaagcaaacccagcagcacatcaaaaagcttatccaccatgatcaagttgggcttcatccctgggatgcaaggctggttcaacatatgcaaatcaataaatgtaatccagtatataaacagaaccaaagacaaaaaccacatgactatctcagtagatgcagaaaaggcctttgacaaaattcaacaaccttcatgctaaaaactctcaacaaattaggtattgatgggacgtatctcaaaataataagagctatctatgacaaacccacagccaatatcatactgaatgggcaaaaactggaagcattccctttgaaaactggcacaagacagggatgccctctctcaccactcctattcaatatagtgttggaagtcctaggcagggcaatcaggcaggagaaggaaataaagggtattcaattaggaaaagaggaagtcaaattgtccctgtttgcagacgacatgattgtatattatctagaaaaccccatcatctcagcccaaaatctccttaagctgataagcaacttcaggatataaaatcaatgtacaaaaattacaagcattcttatacaccaataacagacaaacagccaaatcatgagtgaactcccattcacaattgcttcaaagagaataaaatacctaggaatccaacttacaagggatgtgaaggacctcttcaaggagaactacaaaccactgctcaaggaaataaaagaggatacaaacaaatggaagaacattccatgctcatgggtaggaagaatcgatatcatgaaaatggccatactgcccaaggtaatttatagattcaatgccatccccatcaagctaccaatgactttcttcacagaattggaaaaaactactttaaagttcatatggaaccaaaaaagagcctgcatcgccaagtcaatcctaagccaaaagaacaaagctggaggcatcacgctacctgacttcaaactatactacaaggctacagtaaccaaaacagcatggtactggtaccaaaacagacacatagaccaatggaacagaacagagccctcagaaataatgctgcatatctacaactatctgatctttgacaaacctgacagaaacaagcaatggggaaaggattccctatttaataaatggtgctgggaaaactggctagccatatgtagaaagctgaaactggatcccttccttacaccttacacaaaaattaattcaagatggattaaagacttaaatgttagacctaaaaccataaaaaccctagaagaaaacctaggcaataccattcaggacataggcatgggcaaggacttcatgtctaaaacaccaaaagcaatggcaacaaaagccaaaattgacaaatgggatctaattaaactaaagagtttctgcacagcaaaagaaactaccatcagcatgaacaggcaacctacagaatgggagaaaatttttgcaacctactcatctgacaaagggctaatatccagaatctacaatgaactcaaacaaatttacaagaaaaaaacaaacaaccccatcaaaaagtgggcaaaggacatgaacagacacttctcaaaaaaagacatttatgcagccaaaagacacatgaaaaaatgctcatcatcactggccatcagagaaatgcaaatcaaaaccacaatgagatgccatttcacaccagttagaatggtgatcattaaaaagtcaggaaacaacaggtgctggagaggatgtggagaaataggaacacttttacactgttggtgggactgtaaactagttcaaccattgtggaagtcagtgtggcgattcctcagggatctagaactagaaataccattggacccagccatcccattactgggtatatacccaaaggattataaatcatgctgctataaagacacatgcacacgtgtgtttattgcggcactattcacaatagcaaagacttggaaccaacccaaatgtccaacaatgatagactggattaagaaaatgtgccacatatacaccatggaatactatggagccataaaaaatgatgagttcttgtcctttgtagggacatggatgaaactagaaaccatcattgtcagcaaactattgcaaggacaaaaaaccaaacaccccatgttctcactcataggtgggaactgaacaatgacaacacatggacacgggaaggggaacatcacacaccggggactattgtggggtagggggaggggggagggatagcattaggagatatacctaatgctaaatgacgagttaatgggtgcagcacaccaacatggcacatgtatacatatgtaacaaacctgcacgttgtgcacatgtaccctagaacttaaagtataataataataaaataaaaaaaaagaaaatcttatcagatacacaaaaaacatagtggaaaacaaatggaaattttagaactaaaacacacaacatctgaaattttaaaatttactggatgaacttaataagagactggggatgagagaggaaagaatcagtgaccactgaaattagattaatagagatgacccaatgatccaatctcaaaaagagaaaaaagataaagaatgaggtgcaggcatctttggggcaattcctaaaggcctaatacacaagtagttggaatctcacagaagagaacaaagagagtggggcagagaatgtttttagaagcagaaaactttccaaatttggtgaaagacataaatttacagatttcaagaagctccacaaattccaaatatgataagtatgaagaaactcatagcaaggatgctataccacacacttctgaataatccacaggtcaaagaagtcagactctccggtctgacatgtaaagggcctggaagtcgtcactcccatcctcacagcagcgacaccggcaaggagaacaaactgcaagtcccagctctgcttagacccatcagagagctgagatcacaggacacactgctgcccccaaactgcagaggcagacaggcaaatgcagagaatcgcagtttaccaggaacagaagatgatgccagagcctgcaactgataggttatgcctggcttttaagaaaaaatactggagtcccctccttatcctcaggggacacatgctgagacctcagtggatgcctgaagccttgaataatacccaaccttatctatattgtttttccctttacacatgtacctatggtcaagtttaattgataagttaggcagagtaaggttaacaataaaacagaacaattgtaacaacacactgtaataaagttatgtgaatgtggtctctcaaagtgtctcactgtactgtattcatccccttttggaccacggttgactgcgggtaactgaaaccatggaaggtgaagccacggacacgggggactattggacaggcatgttaacagacacacacacagtgtgaagagcaagggggactatcggacaggcatgtcccatagtgtgaagaaacacagtgtgaagttacaaagtgaggcctcagaaccagattcggatatggcgaaagttttagagttatcagcttgggaactgaaataactgattaatatgagggtgcgaatggaaaggtggacagatgggaacagaagcgagagatatgcacactccaggagtggtacccagacatgccaaaatcaagaagaattcacaatgtacatcagaaagtattttgaacttcaagacaatgttaaaatatcaacacttttatcttgagatgttgccactacagcatttcggggagaaatctgttgctttacatgcttatattagggccgggcccgggggcacacacttgtaaccccagcactttaggaggctgaggcaggtggactggttgaggtcaggagttcaagacctgggcaacatggtaaaaccccatcttctcaaaaaaaaccccaaagttagccgagtatgttggcacatgcttgtagtcccagctactcagcagggggagctgaggtgggaggatcacttcaacccagaaggccgaggctgcagtgagccaagactgcaccactgcaatccagtataggcaacagagcaagaccgtttcaaagaaaaaagaaaaaaaaaaaaaacagcttatagaagagaaaaaatgatcaaaaatcactgaccaaaggtaccacctcaaagagcttaatgaagagctctttaaactcaaggtaagcaggagaaagaaaataacaaagatgagataacaatgaaatggaaaatgaattttgcaatagaaacaattaacaaggccaaatgttggttctttaaaaatgtcaacagaactgataacctcctaagggaattaagaaaaagaaaaaacaaatctccagtatcaggaatgaaaaagttatactatagctccgtcaaacattgacaggtattaagagaatgttccaaacaactttatgctaacagattggacatcttatacgaaatggacaaattgctttaaaaaatttaatttcccaaaacggatactgtatgaaatagaaaatttgaacagcctttaaaagactggatttgttctaaaacaacaacaaaacttccccaaaggaaaactccaggcctagatgacctcactatcaaacacgtaaagaagaaataacactaacgaacgtgaactttttcagaaaatcaaagaggaagaaataatttccaactccttttatgaggccagcatcatcctggtacccacaccgacaagattatcaaaaaagaaaaattacagaccaactctccccttgaaaagacacaatatctttaacaaaactttagcaatttaaacctaactacataaaaaatgtcaatagaagacagccactattttagcaaaataaggaagaaaaaaatacgaatgtttcaatagatgcagaaaaaaagcatgtgaaaaaattcaacacatgctcagggcttaaaaaaaaagtcctctctcaccagactaatagaaagaaacttcctcagtttgataaagggcatctatgaaaaccatgcaactaacatcctaagtcatggtggaccactgagtactttcaccctaacactgggtgtaaggcaaggatgcccacttttactgcttctggtcaatgctaagttagaaagactaacagcaaaaagcaagacagcaagcaagcgaacaaatgaaacaaaagacacagggactggaaagcaagaaataaaacaatctgcagatcgcctaactgttcaaacacaaaatcctaaggaagctataaaaaagctagcaacagaatcaatccgtgagttcagcacattcacaagataagagattactacacaaaaatcaagtatatgttttacatactgccaataacccaatggaatctaaacattgtaaaagcaattccgtttttaatagtactaagaaacgtgaatttttttttgccgtaacttttcatcttgaaataattatagatgcataggaagttgcaaagattgcctagagaggtataggtggacctgccatgcattttccccagtggttacatctgttgttcttatagtacaatatcagaaccagggaactgacgttagtacaatgtgtgtgtggttccatgcactttgtcacctgtctagatttgtgtaaccaccactgcaatcaagagacacaactgtcccaccacaacggtctccctcgtgctaccaatttataatcacagccatcctccttcttccaccatccctaatcccttggtaaccacgaatctgatttccatctctagaatgtatagtcactgatctgttttctgttcctatagttttgccttttctagagtgtacttaaagtgaaaccatacagcatgcggctttttttttttaaaaaaagagacagggtcttactgtgttgcccaggatggaatgcagcggcatgatcatggctcactgcaaactctcctcccaggctcaaatgatcctcctgcctcagcctcccaagtagctgggactataggtgcatgccaccacgattggctaattttattttttgtagagatgggatcttgctatgttgtccaggctggtcttaaactactgggctcaagccatcctcccaaagtgctgggattacaggtgtgagcccctgcacctggcagcatgtggcctttggaagttggcttttttcactcaacataatgtccttgggatctgctcacactgttgcatctgtcagtagcttgcccctttttactgctgggagaattccatggtctgaacgtgccgcagtttatttaaccatttaccaatctagagacattttggttgtttctgtattttagctattacacataaaactctgtgaacattcatgtacaggtgtggtgtggatgtaagtttcatttctctagggtaaatgcccaggagtgtgactgccgggctgtataagtgtatgtttaatttttttttccttttaattacatttattttaatgctgaatttactcctgtgccataagtttttgtttcttcagtttcttctgggatatctttttcttctgggcaacctcctcttctggtttaggaacaatctgttccttttcagtaaggatcatctcaatgtggcagggagagctcatgtatgggttaatccgaccacgagctctgtaggtccggcggcgcatcttaggtgctttgttcacttggatatgctcagtgaccagagaatctacatctaaacccttaagttcagcgttactctctgccaaactcttttccagaacggttgtacccttttacctccccaccagtgatgaatgagacccagcttctcagtatcctcaccagcatttgttattttcactattttctattgtatctgtgttaataggtgtgtagtgctagctcacagcagtctgagtctgcatctcccttaattggcagtgactcaatggctggagaggctggatgtcttctcgtgcttatgtgccatcggcatgtcctctttggtgaaatcacttcatatgttttgttattttctgtttggattgttttcgtactggtgagtattgttttgagagttctgttttctagataatgagtcctttgtcggatatgtagtcagcaaatacttttctcccagtctgtagcttgtcttttcatcctcttactaagaggatctgggcagggcacggtggctcacccctgtaatcccagcactttgggaggccagggcaggaagatcccttgagcttaggggctcgaaaccaacctgggcaacatagtgagacctcatctctactttaaaaaaaaaaaaaaaattagccaggtatagtgttgcgttcctgtagtcccagctattaggggaggctgggacaagaggactgcttgagcccaggagactgaggctgcagtgagctatgatcacaccactacactccagtccgagcaacagagtgagaccctgcctcaaaaggaggacttttgcagagcaaacatttcaaattttgatgaaacaaaaatgaccgtttctcaaaatttgatttcaacggatcactagggcgtcatgtctaagaattcttcaccaagttctaggccccaaggagtttctactgttatcttctctcaagttttagagttctgcgctttacactgaaatctgtaactcagtttgaattaattttgtataagagatttaggtcaaggttcactttttcttccctacagagacagtccagcaccctttgttgaaaaggctctccttcttcactgagttgcttctgcccttggctgcaatcagtcgggcgtgctggcggggagcgatccacgggtctgtccagtgacctcgtgtctctccctgcgccagcaccacacaggcctgaccactgcagggagacaacaggccttggaatcagggagagtggcccctcccactttattctttttcaaacatttttggccattccagtgcctttccgcatacattttacaataatcacatccatgtctacaaaagatcttgctgcgattttcacaggaattgtgtcaaatctgtgtatcaatcaggggagaacagacatcttgacagcactgagttttccatgaacacggcacatccctccatttgtttagatctcatttcttgagtgtttcgtgcttcttatcaaacaagtcctctagatgttgtgttaaatttacaccacagtatttcatttttaaaatgactgttaatggtgttgcatcttaaatttgtttccatgtgtctattggtcattgttagtctatagaagtaaaatttatattttgtatatggatcttgtatcctgtagccttgctaaactgactcattagtctatgacttttctggtagattccttgggattttctgtgccatctgccaacaggaacagtcatatttctttttctctgatatgtctaccctgcatttccttttcttgccttactgcattggctaaaacaggaaattttttttaaatgtgaaaaatttctttactgaaaactgaagaacacttgggcaaaaaatttgaaacctaaataattggagagttatgtcatattcatgaaatggaagattcaacattgttgtttatgctccccaaattgatctagattgaataccagtctcaatacaaatcccagcaggcattttttttggtagaaattgacaagctcattttaaaatttatctcttcaaaacaccacagaataacaaaccattttataaagaagaacaacgttttcataataccaactttcaacttgctagaaagtgacagagtttatcatcggcaaaagaaaagtaatatggatcaaccgaatagaaatgagagtgcagaaacaggcccccacatatatggccaattgatttataaaaaattgacaaggcaactcaaatgaggaaaggaaaagttttcaacaaatggtgctggaaaaactggtgatctgcacataacttaaaaaaaactctcatttggaggatcagaaaatcaaaaaaggacattgattctaactatgtcctatataaatctaattcaaactggatcactaaaactagactgaaaaaaacataggatgtcaggtatggtggctcacatttataatcctacgagttcaagaccagcctgggcaatagagtgagacctcatctctgcaaaaaatttttaaaaattagtcaggtgtggtggcacacgcctatagtcccagctactcaggaggctgaggcaggaagatctcttgagcccgggaggtcgaggctgcagtgagccacaatcgtgccactgcactacagcctgagtgagaccctgtctcaaacaaacaaacaaacaaacaaaaacataggagaggatctgtgtgatcttgggttaggaaaagatttctgtgctgtcagaattctaagatgagcctcgatgacagacgcccctgtctttccctggagtgtggaagggacctgagaatatgatggaacatcacttttgtgatttggttactttaagttagtcaaagaggaggtgctcttgggccaggtatggtggctcatgccaaggtgggaggatcccttgagcccaggccatttgaggttggtctgggtaacacagtgagacctcatctctattaaaaatttaaaaagtagccgggtgtggtggcacatgcctgtagttccagctactcaggaggctgaagtggaaggttctcttgagctggggagttcgaggctgcagtgaaccgtgattgtgccagtggcactccagtctgggcaacagagcgatactctgtcccaaggcgggggaaaaaaggaggtgaccttggcaggcccgatctaatcaggtgggccttttttttttttttttttttttttgagacggagtcttgctctgtcacccaggctggagtgtagtggcacgatcttggctcactgcaagctctgcctcccgggttcacgccattctcctgcctcagcctcccaagtagctgggaccgcagcgcccgccaccatgcccggctaattttttgtagttttagtagagacagggtttcgccatgtcaggtgggccttttaaaagaggtgctctcctgctgacctagaagaaagcacacagccgtgttatgaggaggagccacgtggcaaggaagtgagggcacccctaggagctgccagctagtaagaaaatgggacatcagtcagaggactgcaaggaaatgaactctgccagtaccagtgagcttgaaaaaggatgacaagccttagatgggaacgcggccaggtgcaccagcctgcgaggttccgagcagagcacgtggcgaactctggatgcccaggctgctgacccaagcacattgggagatcattacatctgtgccgttttaagttgctaattggtggtaatcttttcatccagcaacaaaaaacctttagtacttcttagggcaaaataaccatgaagcataaaggaaaatgtcatcttccctgcacattctcagccccagggacctcttgcacttagtacgtactgaacgcttgctgagtcaatgaagacatgtgttttttcaaacctgactttttaaatggcagcttaaatattttttcctttaatagcttagtggttctctgactcctgttcgctgtccccacatcagaatagcaataataaggaatgattcttccctccccctgcaaatgtagctgcctggttaacacagaacacaagctctacagacctaataaatgtctggaaaacctcttgcttggggatgagtcactccctaactcaaaaccaacaggatgagtcagcagctgttgcttcaggctctttatggaaagcccctctatttttactatcctattcttaaacaaagacaaaaacccaaaaactcaacatctccccaactatcgatgcttacagtattagaaatgaaaactcagagcttttaagaaaacaaggctttagggccgggtgcagtggctcacactgtaatcctagcactttaagaaaacaaggctctgcaaacacttatctcattcgccatccaagtgatgacatcctcatacgtcgtgtggcctctgaaaagctccaatgcaggcttgcacatgaaagagggtgtaaagggcagacagtgtctcagcagtttcatgtgttctgtgctgtcagggttctaagacgagcctcaatgacacacgccctgtgcaatttcttcccctgcagcgtgggaggaagctggagtgtgatggaacgtatctcctgtgattgggcgactttcagctaagccaaagggaggtgatcttggtgggcctgatctaatcaggggagcctttcaaggaacctgggggaacccctgaaagggtctcgggggcccccacagcacacttggaggaacccctgtgctagagaggttggtgcctgtgtagcagcgtgcccctaacagcagagtcacagccctaggctggaagccaccagtgcccacctctggttcagtggataatcaagtgcagtttactcatctaatagaacaccacagaagaatggatatgagagggttatcaccgcatgtatcaacatgatgggtctctgctgggcgcggtggctcatgcctataatcccagcgctctgggaggccgaggtggatcacctgaggtcaggagttcgagaccagcctcctgatatggtgaaacaccgtctctactaaaaatacaaaaactagcggggcgtggtggtgggcgcctgtaatcccagctactggggaggctgaggcaggagaatcacttgaacccagggggcggaggttgcaatgagccgagattacaccattgcactcagccctgggccacagagcaaaacactgtctcaaaataaataaataaataaataaataaataaataaataaataaataaataaaataaaaataaaaaccccatgatggatctcaaaatataacgctgaagaaataagtcataaaatggttatactgtccttatttacatgaagttaaaacacaggcaaaaggaaacaaagcgctagctgtaagaactcacacctaccttgcacttcctatgtgcctgcactgttctaagggcctcccccatatcaccttcattctcacaatactcacggtgtgttattactgttctgtccatgtgacagatgggaagactgagacaaagtggttaaataacatgcccaagtggtaagttactactgtttaggaataggtggtaaaaagacaagtaaaaggaaaggaataattagccaaatactagaatagtggtgacgctggggtggcggtagtggctcacatggggtttatgaattactgttgatgtttttcatctgagtggcaggttcagaggtgtttgttcatgctgtttcacgctgtgcctattttttcagaccctcttctgtagtcatacaggataggagagagatgtatacacttcagaattttaaaaagagcaaaagagaaaaaacacagactgaaggccatgaaaaaaactgtccttagggctgggccgctccctccaggcagtttctgcaacgggtgcagatgccgtccaatgcgattgtccgcccccgtctcagagccccacggccagctgaggtcctttgaaaagctccgctccctgctttctgccacctgctcctgccaagcaggctgtgtaggctggaagccaccagtggctttgtcacatgaccacaaatgcataaaaatgacaggaacactcagttttaaaagtattttttaaaatatgaaaacactaggatgtcaaggttgaggaactgaaggtcaagagctccaaggcctctgttggcaatgtgtagcttggatgtgtggacaaagagagccccacgtgatggacgtgctttcttcccatcgcccgcctctgcctggggaaggagtggagattgaagacacacccaacgcgtgcagagtccaggcaggagggcacaccccagcacgagctgctcaggctcgcctcccagcagcgctgcctccctaggtccacaacctgctgtgttctgcacaggctcgactcaatagaatgccttaccagtacaccagggggacaccaagtcagaggatctgaactggctcactgccaatcacccaggagatcaaagcaatcaatgtcagtggtctttcccggacgctgtggtaagcacctgagaaccacccaggcccttctgcctgtcaaatcaacaccgtggcttcacttccttctgggcagagcctattcttcattccaaagacctaagatgactatggcaccacgtcacatcagggcgtccctgacgagcactgcaccagagcctgtgaagactttccacacacatccctcaagcaggacagacctgtcactgtccctttaaaccttcccaacctccaccctccaaatccatctccatttccttctacaggcagcttatccagagctaagtttagctacgaccatttctaatctttcctctagggacagcgtcgagctccctactgctggaccgtcccagctgcgtggctttaccaagtcaccagaggttagcttgtctgcaagaggctggtgacacgaggaacagaagttgtcacatcctcacagcaatgtggcttctttggtggggagtggggggttctggctggcaccttccccactccagctccccctgtccttcccacagtcttgacgaagttgcttgctctcagtcctcacagttcatgggtagttttgggacagcatgttgttttagacccaaaacaatgacatgtaaacggagtcaggaacgtagcacgcatctcatagaaagcatttcctacacgtctggctctcggctgtggggctcctcttagagttatgcggatgggagacaaccacggccgcctcaccgagccaccgtgcacggcactgcgcaaacaagctcccagcacagcagccccggctctgctacctcccggccgtggatggcacagtccccctctgggtctcagtttcctcttctatgaggtcaaagccaccaccccatgctcacagagccgtctgctggctatgcctagaggcacggggtgggcacgcagatggcagctgtgatttccctgaaaccagacatctgtgccacacagactcccaaggacggctgacttcatggcagaatttgagatatttcagaagcctagtacaaataaagaagaaaaccagaaactttttcctaaaacctgatgcaattcaggatgactaaaaagagctggaacggacagcatcgccctccagaattgtcactacctcatctaccgaattcctaggatacaaacagttctcactttacacagggcacgttcccgaaccggcctctcaggacggaacccaaagacaatttcacaggatttacaatttgcagctattggttctcctttgaccgaatccttgaatttgcttaaaaaacaatgaagagttgacaagatgggccactggaaaatgaaaagagcatcggcacttcacgttcattaaaacgtgaagagatgaccaactaatgctgctttcataccctggatagtgctgagtacctaacagctctttaggtcacaacgtaaaattcggcttccagctggtccagttttcccatctgtcgtatccacggaatgtccaaatgtaagggaaaaatgtggagtgtccagccgcccaccagtccacccagcaccacagcctaacctcaccgaggcctcccagcactcacacagaacactcgcagagaactgcggctccatccgcattccttaccttcattactgtccctacctccagcccctccagaaaaaagcgaaagcggcagagaaacctgtgaaaacaagacatgccaaaaatactgactcaaaataccaaaagctctcaccctgaggtggaggggtcaacccaggcttcgtttctaggagaagttgtaagggcttcgtgttctgcactgctaggaaacaccaccctgacttagggtcgtcacagaaggtgcacatggcggggccggcgtgcacccaccactcacgccaggcgctgcgcgactgctgctggacacacacgatcccaccgaatccagacacggtatggcggttcccactttcctcactgaggaaaccaaagcttagacgttaacttggccaagggcaaaaacgctacttaactccaaagtccagcctctgaacccacccgtgtgcggggcctgaggtgtgagtagcctaactgtggactacaaaagcagttccaccacgccttctattctggagttagatccaatgacatttcctgaaaattacatttacaaacccaaaaaaggacaatccccttccggataagaccccaatgccatgaagcacagagcggcaggacgatgagaggataaatcatttggaaagaaaccacgctgcccgggtggaggagcgccagagggaagcaggccccatgtcctccctcccgcaggaagtgcaccaggcccgtcctttccacccaggctgtacaaaagggaggaggagcactcagggcggcctcccatccgccacacacccagtcagcgcggctccgaagcaggagagggccagctccgagccctgctcgtggagccattggtgctgcggcggggagaagaggccacaggcggggacgccccagacactcccgtggggcccgtgccagggtctcctgctcctcagaaagagcccttgtgtgctactgtggtcgccaacagccccgccggccactggcccaggactcagcgtgccgttcctccaggacgcagaccggggctccctaccagccttgagtgagagaccacaagcagcctctgaagtcatcttcctctctcttctcagaagcatttctcgaatattctgctgacaagaggttagcaggacttcacaagacaccccaacacacacacacacacacacacacacacacacacacacacggtctcaacacagttcagaaaacacatttgccttcccaggcccgtgggaggagtgctgtgaggctgagacacagcccggcttgctgacggcacaaatgccggtgcgccctcggcacagtttgtttgcttcatcgggcggagaaggccgagttccagctcagggagcccacaaaggagctcttcctatggccctgccaaacgcctggagcaaaggttttgtctggaaaagctccccgagctccctcaaccccggcagcagtgctgctctatggctgaggatgaagctccagtccatgtcccaagcagtgtctcaattctcaatggtcctgtaatctaaggctagctcgaaacaaaaaacaattattttaaggtctaaaatatgcagaaagagctgcagtgaacacatttacacttcccaaggacaagcatctaaggaagatccctggtaagaatgagaaagcctgggcttgtccaggaaaccaaagcttcttctaaatgtgccttccctgcacaaaatgcctcccccacaggctctgcttttcctgtcgcctggaacaagaaagctccctgggcaggcgaggccgggacctctgcactgagatccccactcagtggcctccatggctggcagagagcgagggagacggagagagaaggagctcagctgagctgttgctttagagtcttggttaaagtgaatccaattatgcacccttctttcctatagcaacactacaggggcatgagaacagggtacgcacctaaagtgaggcttgcctatactttctagaagtcttcctaaggctgctgtgctggtgtcctctgattggttgagtattttttatcattttggttttgagacagggtctcactctgttgcccaggttagggggccgtggtgcaatcatggctcactgcagcctcaaactgaagtgggctcaagtgatcctcctgcctcagcctcctgagtagctgggaccacgggcacgtgccacctatccccagctaatttcttttttttttttttttttaataaagatgggatctcactatgttgcccaggcaggtctcaaactcctaggctggagtgatcctcccatctcagcctcccaaagtgccaggattccaggcgtgtgctcccgcatccaggcagtctggtttattattcacacagaagtacatctgatattgctgaccagaggagagttgagattccgtatgaagtctatttgttcaattacctgaatcctctgagacgccccagttgcccagtattcacagtggttgtggtcgggctcagcgtttacttcacaatccagactcctgggctttgtctctgacatgtgaatgaatgatctcctctgccatggcttagggagccagggcctgtcagctggtctcatcagagctgaggctgccctcgaggtggggttctgtctgaatgcatctgagttttgctttatttctctgtaaactgtaggtgagctgggtgaacccagtagcttcagccacagctgggaactgaagcagcatctgaagtccctctcattctcccagcgtgagccggcggaccctgaagggaacactgagactgaccacagctggacttgcgccgcctcgtcctcttagtgaatgaggtcctcagaggcttaagcacgcgttagttatccaaaatgcttctgttcaggtgaatgcacaaagcgttgaggtaggtcaactgcattttgtacggtggaaaagtaataagcagtttgctttttgtattataatgaaaatgaaaacctttccttaaaggaaaggaagcataatctcagaaatctgaatccagggaatcccaaataacccccccaaattttaatccttgacattcataatcacttggattaaaatctaagggaaaaaaagaatcacaggctgactttttttttttttttgagacggagtctcgctctgtcgcccaggctggagtgtggtggcgcaatctcggctcactgcaagctccgcctcccgggttcacgccattctcctgcctcagcctcccgagtagctgggaccacaggcacccgccactgcgcccgcctaatttttttgtatttttagtagagatggggtttcatttagtagagatggtgttagccaggatggtctagatctcctgacctcgtgatccgcccgcctcggcctcctaaaatgctgggattacaggcctgagccaccgcgcccagcctacaacaggaagactttgttaaatgaatgagcgcgcagggaagagcaggtgctttgtgaacttgagagcttcacttcctaatcctgtgactccaacattcaattaaaggtaaagaaaaccagcaagacgaggtagggagttctgtatcctgtgtttgtttttttttttcttctttttattttttgcttttgagacagagtctcactctgtcacccaggctggagtgcgatggcatgatcttggctcaccacaacctccgcctcctgggttcaagcgattctcctgtcttagcctcctgagtagctgggactataggcgtgtgccaatacacccagctaatttttgttttttagtagagatggggatttcaccatgttggccaggctggtctcgaactcctgacctcgtgatccagggcccccctcccctccccccaagtttccaaagtgctgggattacaggcgcgagccactgcgcccggctccacatccacttttttaaaaagtgtagtaaaaaacatattgacataaaatttaccatcttaatcattttaaaatgcacagttcagtggtgttaagcatattaacgttgttgtgaaaccgatctccaaaactttttcatcttgcaaatgtgaaactttgcactaattaaacaactcccatttccccccatctgcccagcccctggtaaccagcattctactttttgtttctatgcatttgactacttcaggttatcacataagcagaatcatacttctgcgactggcttatttcacttagcataatatcctcaaggttcatctctgttgtagctagtatgttagctgcagtctttcctttttaaggctggctaaaattccattgtgtgtatgtactacatgctgtttacctgttcatccattgatgaacatttgggttgcttccgcctttttttttttttttttgagacggagtcttgctctgtcgccaggctggagtgcagtggtgccatcttggctcactgcaacctccgcttcccaggttcaagcgattttcctgcctcagcctcctgagtagctaggattacaggcacccaccaccatgcccagctaatttttgtattttaaatagagacagggtttcaccatgttggccaggctggtcctgaactcctgacctcaagcaatccacccacctcggtctcccaaagtgctgggattacaggtgtgagccaccgcacctggccagcttccacctcttaggcattgtgaataaagttgctataaacatgggtgtgcaaatatctctgagaccctgctttccattcttctggataaataccccgaggaggcactattggattgcatctgggtctcttcctactatatggctgtgccattttacattcccaccaacagtgcacaagggttccagtttctccattcctcaccaacacttgttattttgtttttcttctgatagtagccattctaatggatgtgtggtagtatctcattgtgattttgatttgcatttctctgaccatcagggatactgagatactttgcataggctagatggccacttgcttatcctcactggagaactgtccattcaagccctttgcccattttttaattgggttatttaactttgcttcttgttgagttgtaggagtcttcatacattctgaatgttaactcttttcacatatatgatttgcaaatatttttcccgttttataggctgccttctcactctgttgattgtgtccctgtacccacaaaaatgtttacatttgatgtgctcccattggtctatgttttcttttgttgcctaggcttttggtatcatacccaagaaatcactgctaaatccagtatcttgaagctttccctctatgttttcttctaggagttttagttttcgtgattatgtttaagtctttaagccattttgagttattttttgtatacagtataagagttgtggtacttaaaaaaaaatagctatgctgcattccactgaataaatgtacaatcacttatgtgaccctttcgatagccacctgggggcatttccagtgttttgctgccatcaacaactgtgacatgaataccctttatagtaccctctctcacacacaagaacaactgtttccctgtcttcttatttaaaatcaactcttggctggcgcgtttcaagttttttacttcttcatttgtattgtaactcctaacctttaaacccttagcaccagatatattttggaattcagaaactttcagattttggaaagataacatggtacatatgctatgcattaccaaatcctcatcgtaaataaaatctgagaatatttctacaataacatagatttgtgtgtgtgaacagttgtactaatggagactatattttattttattttagtttttgagacggagtcactctgtcacccgggctggagtgcagtggtacaatctcggctcactgcaacctccgcctcctgggttcaagcaattctcctgtctcagcctcttgtgtagctgggactacgggcacatgccaccatgcctggctaatttttttatttttagtagagacagggtttcaccatattggtcaggctggtctcgaactcctgacctcaggttatccacctgccttggcctcccaaagtgttgggattacaggcatgagctaccgcttacagacctaatggagactataaatggccacgggtatgtgaggccaggctttgctactaaacaagtccaaattgagttagattaggttttgctgccaaataagtgatcggaaatggtttctgttttccaagtttaaatacagcaaatgtagtgactaaggaattgctaattcaaacctggatctctcagcttcaaagtcatgtcacttcatccagtgaagatcagtagccttcctttttgaggtcctggcttagcaagctacgtttttcctagtatttctctgcttcagagaactcagaaaaacactaactgcattcgaggactgcgtgaaatgaaatcacatcctagagtcctgagacatgcccttaaaatcatggatgtaacactcaggaaaacaaaggttagagtaaaacctaatgctaataagttttctttcaaaatggttataatgcagttacgtacatttagaaaattaattcagttataaaattaggtaacaggtgaatatgctctcaaggtaaaaaaaaaacaaaacaaaacaaaaaaaaaaacagtaaacctatggataaaggagagttcattcccactcattcccacaactattaatcactgttatcaacttggcatacacttttctacctttgtttctgtatttaatatgtgtatattgtatgtggagaaatctacactttaatgatttgtttggtttatataaatgggataaactactacacattgattgttttccaagttggtttttacccttaccatgccttagatatatttccttttctttgagatggagtctcgctccgttgtccgggctgatctcggctccctccacctcctgggttcaagcagttctcctgcctcagcctcctgagtagctgggattacaggtgtgcaccaccacacccagctaatttttgtatttttagtagagacaaggtttcaccatggtagccaggctggtctcgaactcctaacctcaagtgatccaaccgtcttggcctcccaaagtgctgggattacaggcgtgagccaccatgcccagccaccttagagctgtttctgtgtggaccttcattccttctaatagccatctggtattctacttaaacagcatcactggcaggtatttacgtagttttaatttctgctactaccatcaacattgcagaaaccatcctcatgcacaccacttctgggacatgtataattatgtctgtaagctaggtatctgtaaatagaacagctaggtcaaagagtatccatattaattttttaaaacagctctggccggctgggcacggtggctcatgtctgtaatcccagcactttgggaggccgaggtcggcggatcacgaggtcaggagattgagaccatcctggccaacacggtgaaaccccgtctctattaaaaaaaatacaaaaaattagccgggcgtggtggcaggcgcctatagtcccagctactcaggaggctgaggcaggacaatggcacgaacccgggaggtggagcttgcagtgagccgagatcgcaccaccgcactccagcctgggtgagagagtgagactctgtctcagaaaaaacaaaaacaaacaaacaaaaaaaacacagctctggccaaattctctcccaaaaaggttgtaccaatttatatcctaatgaacaagggtttaagatacccacttctttatacccttaacacactggatattatcaattgaatttttttctgaatttgatgggtgaaaagtgatatgtcattacattttaagtctaagtgtttttgtttttttaaatcatgggggggcaagtactttttcaaaattgcttttataaaattaaaggtttataataggaagttacaataaaatagatcatagtgacatgcagagctaagattcaattcaagctatagactggcctggtactgtgaggaaaataaaatatatcctcaacattattcaactgcatagatagcaacaaataaacaaacctacaatgtatgactttactgaggttcactgccataatatactataaacaggataaccatatgccccacttgccctggagagtcccaatttgagtcaatcatcttggcaaaattgtttaatagggtcttgttttatttataaacatgtcccgtttggaaattaaattaaatgatcacacaattttaaatttaggctcaaattgaggctcaatagcctctagaaccatatcaagctcaaagagttcaattctgacatagttcagctaggcttgtgacagggcaatgcttgtccattggagttggcattagattaagttagagttagctaggcgtggtggtgcacacctgtagtctcagctacccaggaggctgaagtgggggaaatctcttgagcccaggagtttgaggatgcagtgagctacgataagcgtgcctgtgaaaagccactgagctccagcctgggccacatagtgagactccatctcaacaacaataacaacaacaaaacaaaacaaaacaacacacagaaagaaagaaagaaaaagaacaaacaaaaacaaagcaacatggatgcttcactgggcagcagagctaatgggatcctgtgcttgttgctttgtgtttccacgtaggacgattacaaatcagagttactgaaaccgaatgccccttcactgtataccataggaatactggcactgcctaagtgcaaggccatcgtgcaagattatggcaatgttttaagatcatctaaacgtggacctgggggtactgcaagcgccaggctctgatgactccttgcagagcaaatggacagggaacagacttagtaaaccaaattattaaaatcaaagaaaaggccaggcgccgtggctcacacctgtaatcccagcactttgggaggctgaggtgggtggatcacttgaagttaggagttcaagaccagcctgaccaacatggcgaaacctcgtctctactaaaaatacaaaaattagccaggtgaggtggcaggcacctataatcccagctactcgggaggccggggcaggagaatcgcttgaacctgggaggtggaggttgccgtgagctgacatgtcgccactgtacttcagcctgggcgacagagcaagactccctgccactcaaaaaaaaccaaaaaaccaaaaaaacgaaaccgcacatagtgaacttgcccagtctgatgacttctgacatatgcatacagctgtgggaccatcataacagccaagatcatgagcaaacacccaaacaactcccactgtggccttatcagcccttcccctcccctgcactcccttcctgcccaggcaacccgtggtcggcatctatccctccatgttggtctgcatattctagattctcatgtaagtcagatcttagaggacactcccttctttgtgtggcctcctgcacttggcacaattctttccagattcgcccatatgctgcaggttaccaggtgctccctttcctggctgagcagtatccccacagaagggtgcaccccagtctgttcatccatctgcttgttgatggccacgttcccaatgttcagctgccataaacatgtgtgtgcaagtctttgtgtggacaaatattttcacttctctttggtaaatatctacatgtggaagggctagctcatgtgataattgtatgtttaacttttaagaaagtgccccgcttttccaaagcaggagtaccatttcacatttctaccaggggtgtgtgagagcctgagttcccacccccgccctcactgtgccttgggtggtcgccttccaaagggcagcctcctaggagagcatgtggtgtctcaccacggtgttcaactgcatgtgtgtcatgactgatgacgtcgactgagcatcttttcatgtgttatttgcttcaggaatctcttctttgttcaaatcttttgtccttttaaaaaaattgttttcttgagttttgagagttctttacatattccggataatctgacaaaggactcatatcgagaattcccaagaaaatgaccaacaacccaacagggcaaaagatttgcacaaacctgttatagaagaggatatcccactggccaacagatgtacaaaaggtgccaaacatgctgggtgcagtggctcacgcctgtaatcccagcacttggggaggcagaggcaggcggatcacgaggtcaggagctcgagaccatcctggctaaaatggtgaaacccgtctctactaaaaatgcaaaaaattagccgggcgtggtggtgggcacctgtagtcccagctacttgggaggctgaggcaggagaatggcgtgaacccaggaggcggagcttgcagtgagccaagatcgcaccactgcactccagcctgggcaacagagtgagactccatctcaaaaaaaaaaaaagaaaaaggtgccaaacttatttagtcaggaaagttcttacttagaaatgcaaagtaaaacatcaattgatacccaccaggaggcttaaaatcaagaggacaatgccaagtgttggttagaacgtggactaactgtcccacactgctggagagactataaaccagtacggccagtttggagaaatagttggcaaacccagcaatcccactcctaggtatatttccaagagaaatcagtgcatatatccattaagagacctgtccaagaatgttcaaagcagctttactcacagtagccaaaaacgagaaacaaacaccatgtctgtgaacaggagaagaaataaattatggtgtattcatttaatggaaggctataaagaaaaaagaagaaaataccaatccacgtagcaacacagatgaatctctcagtcattaagcaaagaagccagctaaacgattccatttaaacaaacttcaaaaacaggcaaaacactaatctacagtgatggaagtgaaactagcgtggtcaccaggaggagtggtatcaatggggaagcagcgggagggactttcttggatgctgaaatgttctttcacgtgggtggtggctgtgtgagtagatacatacgtaaatctcattgtgttgtatacacctaagatttgtgcattttgcacacagaaattatacttcaattaaaacaaataaacaaggctgggggcggtggctcacgcctgtaatcccagcactttgggaggccgacatgggtgatcacctgaggttgggagtttgagaccagcctggccaacatggcaaaaccccttctctactaaaatacaaaaattagccaggcgtggtggtgggcatctgtaatcccagctactcgggaggctgaggcaggagaattgcttgaacccgggaggcagaggctgcagtgagccaaaatcacaccactgcactccagccagggcgacagagtgagactcagtctcaaaaataaacaaacaaacaaaaccagaatgagatacctctacacggccaccagaatggctatttgaaaaagaggacaagcactggtgatgaggtggagtaatgggaacttggcctctgctggtagagcacaaatacaaacactgtgaaaaatccatgaacactgaacccaggcacacctggatgccccagcaagtccacccctggacagccctgagggaaatgcctacatctcttcaccaaaagacaggttcttgaatacctacagtaacatttttgtaatgacgctgagctggcgtctacccggacgcccatcaccaggagggcagggaactaaattgcgggacattcacaaaatggaattaccatgcagcaacaaggaagaacgtgccgcagaattggaagaaccgcacaaaacgaaatggcgacgagaaggagccagtaacacaggagtaaataccgtgtgaggccacagatgaagcagcaacgcagaaatacccattctacagaacagctggtgttcacggtcagaactggttacttctggagagcagaaggtggtgtgaagatgaaaggggttctggggcacaggtcattgtttcctgagctggcggcaggtcacacaatctgctcagtttgtgaaaactgagttaatatagatgcacttttatttctatacatgtatatgcatatatacacacatgcatgcatatatatgtgtgtatatatatgtaattctccaataaaaacattttttaaatgaaatagggaaaggtaataggtagtggtgggtgcggttttgactttaatcaagattgtcaggtaagatttcatgaagataacatctgagtcaaaaccttgatgagataaaggaggaagtgcattccaggcagaaggaacagcaagcacaagggccctgatggcgctgggaggccctgagtgtgcagggagcagcaggaaggccagtgcgcctgcagcagtgacagagaggaggggagcaggagatgggcttgccgaggcaaagggggggtccaggttgctaatgtgtcgaatgctttaatgatataagggtcaaaaaaagtacaaggtttgagaacctacagtcaacacgtgtcactgaatcttcattccttttgcacttacaggtttgtcttcctttttatataacttctttcaaaggtaaataaaatcaggcacgtctaagaataaacataagtacaaagcccagggtacttgtttttccccccttttaaacactgtcacatatttacgcagctatctgtgttactgagccaccttcttacctggggttgggttgactcatgcacagtggttggcacagcaggcagtcaagatatgagagtcaatattaataatattctcaaaagagtatgaattgcacaatttaatttaccgacatcccttcccaatttggtggcaccagacgtggcttaaagagttaaacaatttggacttttcactatgtgatgagttacttcccctctactgaggatgactaacatctttcaagtttttggatagacaatacatgcacagagtaccaaattcgtaacaggggaggaggacgctagagaaaccagtgtctcagctccctagctctcctttctgtaggcagccgctgcgccagcttccagggtgttgaggtttgatttgaataggcttaagatatcctttctctggtgctagtatgctgcttttaattttgcagcctcatttagggttagatacggtcatattaagttgatgggaaggagacagagccagcctgaatgtcctgggtgatgaggattgaagtcatggggtctaaaaaggttctggaagacgaagagtgggaacgacaaaccgagaggaggaaaatcatctgcaaataaagcctccattgctgatcccttctatctcagccacagcagctcaggaggaacgtcgtgcccagtgtctcgaaaaggcctggagccgaagcactctgccagctcttttcataaacgcagaagcaaaacagagctgcctggtctatgggcatctgcgaaacttggatactaaacgcctgtgtcctacccaacagcctgttctaacgtgacgggctttcttaggagaagatatctgccatcaaactctgcctatgaattaaagcagagggccaggctccgaatcacgtcacaagtggaagagacctcagaggctcatcagtggctctcaatacaggccaggctcagaatcacctaaggagcctcccacagagctggcagagtcctcccctcccttcatccctcacactacctggacaggttacccaggggcacagggcccagacccgtactgtggaaaaggtccgtacagctaggcttaatgcagccattctgcctgccagctggagagacagaaactgccggtggctatggggcagctcccctggtgggaaggccctggacacagctggcaagtatagccctgggggctaacaatgggtcttttgatttttttttatgagactgggtttcaccctgtcatccaggttagaccgctcattgcagcctcaacctcctgggcttcagcaatccttgctcaggctggtctctaactcctaggctcaagtgatcttcccatctcagcctcccaaagtgctgggattacaggtgtgagccaccgcgcccagccaacaaatgggtcttaaccagagtgaacactgactctggactgggctttgcttgcctggtggaagaggccagtgctcagagtgctatagaaagaacagaacagaagacactgctcggatctggacaccgaccgtcatttcctcagaccaggggacacactgtacatcccacggtgtccaacaacgggcagagacgcatcctcctcggagtgagtctgacagagcagcggaacggggagttaaaaccctggctaagacaggggcgatgaaagcatgaagggctggcccacattcaacggctaaaggacgtccccattcgatgttcctgttttgtggatcagggaaagaggggctgggaaggaggctggtgtgaccacacaattcttgccgagagaggagcaggctggcataaggattacacatttttcttccttccttgcatcacctcagcttggccaccctgctcccacttggtgcagtgatcctaggaccaggtcttgcaaccccagtgctggaagcagagctggttcctaagcaagaaactgtactgtttttaaaccttacgtcggggccaggagaggtggctcatgcctgtaatccagggactttgggaggctgaggtgggaggatcacttgaacctgaaagttcaagcctgcagtgagctgtgactgtgcagctgtgcttcagcctgggtgacagagactctgtctcaataataaaataagaataaaccttacactggaattccaaggacctgatgggggtgggttgtgcctttaccccatctgggagaactggggttcacggtgactgcagctgtacttcctggtggtaaatacagccccctagtcctgcacctgtgtagccctaccctatctgaatgggagtggactgaggggagacactggctaggttattgctgcctgcaatccagaccagcacagtgactgaacctaatgctcctttcaaacgtggacgcttgggtataaatgaagaaaaggaggactagtagcagagggtaacggaatgaataaatgggccatatgatagaaatccaatggtatattaatacctcgaaagcagcttcaaaacaagagatgatattgtctcttagttcaattataccagatgcctgaaagggcgaagctatatgtttggaaatggaaaggaagaccaaatgtatacttcacaatatcacaacactgttatgaatggaatggctgtgcctccccaaattcctatccctaattcccagtgggatggtatctggaggtggggtctttgggaggtgattagggttagaagaggtcataggtgggagcatgacctgattagtgcccttataagaagacggagagacatcagagcttctctctctctccaccatgtgaggaagcagcaggaaggtggctgtctgcaagtcaggaagagagccctcaccaggaaccccaccggccagcaccttgatcttgggttcacagcctctgaactgtgaaaaatatatgtctgttttcaagccacacagtgtgtggaactgttatggcagctccagctaagacagaaaacatgatgaaaatactactcctggggaatctgcccactcagatgtgaaaggctcataaataaactcagatttgtttctaaaccttgaactcataagcaaggaaattttaaaaagatcaactaaaacttgtgaggtgtccctggtgatcccagcaaagatgtcttccaacttcagaagaggagggcctttcaatctcctatttaccaaacagcaaatcacaactgcactcacatcacaggaatgtctccgaggaaatgctcaaacacgagctacactatgccgccttagcggcatagtcttttccaaagactcgctgggatacatgtgtccagttgttaatactggtctgctagaaggtttagtgagaagagacttaaaaaaaagcatatttcgccacaattttttcaaaaagagaaaagaaaaaagtcataacaacttaataaatcaagcatttcatttggcttaaacgcaaaattctcacaaaacctctcctaagaacagccagaatagggcaggccttgctttttcacaagagcaggctggcttctgagtctccgatcaccacttatggattgcatcagcccatctgtgccacctccctcctatctcttttgagaatttcatctttcattcaaaaccacccaagttaaagtctgatttcttccatgacactcacaccaacagctccctacttacatagagctggaggctaaattgtgatcatctctccacaagttgggtaatacaggcccctacttcaggagttcagacccctggctctcagggagatgaatggaagaaaatcgttcctcctatagctcatagcccactgctgagcacaaaagaaattcaaaatcagagagccaggtaggtaaacaaatactacttgctaagcatggtgctagatgttttcacatctctcagagtcagtctaaaaggagggtattaataccgccttccttgatagctaaggactgaagcttcaataatatgtagcgaaaatggtgagagtccagggctcttctcattccctgggctttactcagttcttgtggaagctgattaaatttgttgaaatctggtaaaagtggatggggaatggggttgatactaccaccctttgaaactttcagattaagggtacgttatatttaaccagaattatttcaactgtaagccttctttcaggaataatacataaactttatgggaggccgaggcaagaagactgcttcacagtgagactatctctacaaaaaataaaattaaattagctgaggctgggcgtggtggctcctgcctgtaatactagcattctgggaggccaaggcgggtgaatcacttgagcccaggagtttgaccccagcctgggcaacatggctgtttctctacaaaaaattaaaaagcctgatgtggtggcatgcctgtagtcccccagctactcaggaggctgacgtgaggaatgcttgagcccaggaggcagaggttgcagtgaaacaagattgcgccactataatccagcttgggtgacagagccagaccctgtctcataaataaataaataagttgggtgtggtggtgcacaccggtagttctagttactcgagagactgaagtgggagaattgcttgaacctgcgagttcgaggctacagtgagctatgatcacgctactacactccagcctgggagacagagtgagactctcaaaaaaaaaaaattcctgtcacagtaatttttataattcactctaaaattgttctcatggccttttctgattataaaaacacttcatttttaaaaactttttaacttttttaagacagagtcttgctctgtcacccaggttggagtgcagtggtgtgatcttggctcactacaacttcagcctccggggttcaagtgattctcatgctgcagcctcctgagtggctggattacagacatgtaccaccacgcctggataatttttgtatttttagtagagatggggttctgctgtgttggccaggctagtctcaaactcctggcctcatgtgatctgcccacctcagcctcccaaagtggtgggattacaggagtgagccagcaggcttggcgaataatacatgttttggccacagttaaaaataaaaataatttagaaagtgaatgttttcataaacatatataaaaataagaaaaatagaacaactgaggtagctcagtggatgtacttacaccacgtactagttttttacacatttctgtgtacatatatatatatatatatatatatatatatatatatatatatgcctgttttcccttctaaacagaaacaggatatatattttgctacttacctcactttttcacttgatgcgtcagggacttctttccatgtcaacatagagagttctctctcagcttttctaaccgctggacaatattctatcacatggtcagtattccagtttagtcaaccaacccctaccagtgaataattaggttgtttcctttttgtttttataagcaatacaataaacatccttgcaaataatctttgcatattgatctgattttcctttttaaaattattattgtaaattataacaatataggaaaaatgcataaaagatacatgcactaaccgataaaatagcaatcacaaaggtcaacaaatggactgcaaccagcacctcagaagcacccttatcaaaacactcgctctgtcttctagaagcaaccactgtcttgatgctggtatcctttccagtagttttatctcctgtgtatgcactcttcaacaatgtggttgaattctcaatgtaatcacactatatatgtgcttatgtatgaatgtaaacacactatatgtactcttttgtgtctggtatctttgggccaacatcataatgtttgtgagattgatcatattgctgagagctgtcctctgctcatttttcctgcagcattcagaaattaaaaaaaaacaatttactcacccattttactgttgaggaacatttggattttttcaattatatataatgctatgaacatttacatacatggcttttcatacctaggattgggattactgagccactggaaacacatatcttaactttagtaaatcatacccatctgttttccaaactagagaaaccaacttgtgttcccaccagcactgcagtgtatgagagttcctgtcatcccacatccttgccaattcttggcattgtcacgttttaatttttgcaaatctgtgagtatatcataatatcatctcctcttctcagaagtgcctattgaaagccgtaactcatactgaattgcctatttctggatactcacacctttgtaggttacagatagcaaatgacttcactgtcacagctggtgctatctttgaaaatatacagcagttcttaattttatgggagtcaaattattaatcttttcctcttggatttgtacttttagttctttaagaaattctctcctacatcaagatcatgaagattctctcatatatatgtgtatatacatacacacacacacacacgcacacgttaaatacatggttttgcctttcaaatttggtctctaatccatttcaaagtaagtgtctgtgtgtgtgtgtgtgtgtgtgtgtgtgtgtgtgtgtagggtacaatttcattgttctttatgtggtttgactactctacttatctaattctgcaccaacacctccactgtattgaagttcttaaaaagataaatcttaatatctgataattagagaaagggctagcaaacttttccagtaaacagccaaatggtaaatatttcaggctttgtgggtctaaagacatgtagctgtctttactgtatattcttttttctcaagccttgaaaaatgtaaagaacaatcttatttcatgggtgggcgtacaaaaataagctacatgaaatttagcttgcaggccaaagtttgctaatctctgtgatagagcaagtccatgttattcttcatcaataacaactacaacttgacatcattactcctcaagggaacgcaaatcaaaaccacaatgaggaaaagaaaacaaagctcaaagactcacagttcccactttgaaaacttactacaaagctacagtaatcaaagtgatgtgttcctggcataagcatagatgtatagattgagagaatagaatttggagtctagaaataaacccacatatctatggccaattgattttcaacaagaatgccattaaatggggaaagaggagacatttaacaaattgtgctagaacaactgagtgtccacatgtagaagaatggatttggacccctacctcaaaccatatacaaaaattaactcaaaatttaccaaaaacctaaatagaaaataacttaaacataaaaagaaaatgtaggtgtaaatcttaataaccttggatttggcaacaaattcttagctttgacaccaaaagtgaaaacaaaagaaaaaagagatgttagtcttcatattatttcttacacatttcaaaccttccatcagaaatcacattcttcctgtttcaagtgtagttcctatgattcctgttgggaggatttgctacccatcaactctctgtgtttggaaatgtctctgttctgccttctattttacaaaactcaattagattgagagttaagctctcttgtagacaccacctcgagatatcattccactctttctggcgcctgctgtagcttttgggaagaaagctgtcaaactgtcactccttgaaagttcacgtctacctttttctgtagctgcttttaagattttcctctttgtgtttggttttctgcagttttattatgtctatagtgttttggttttttttttttaatcttgcttgggattcactgggtttcttgactgtttgatatgatttaccagccaccgtcacttcaaacatggtgctgccccgacttttcttcctgtgactcagtgttaaacgtgcattacaccttctgaccccatcctccttcctcctgaccttttatattctccctttttgtctctcagctctacattcttgatactttcttccattatttcttctagtttactaatactttgttgcctaacatagccattgagttttttagttttaaatgttcaattctagaatttctagtttgttcttttaaacatatgccatgtcactttaaatagtgtccagttttctaacttttatctttaaacaagttagggcagctgtttaaagaccggtgtcggagtccaatatctgaagcatgtaggtctgacctgaccccaccgtctgctgcagcctctggttccaggcactgtgttgtctacctgggagtctggctgtctctgtgatgcccctgcccctaagaaaccatctgtggggaatctccatggtttagggttaaagtgtctttccagagaaagttggcttctaccaggcacttgggtatgttatctgtttggtgtcactttaaactggatccatcgcacaggggttgcctggactgccatggtgctaggtatgtgggtgacaggtctcccggggagctggcccatgggtgggatttagtttgtctcctccctctccctgccctgcttctctgctgtcccctctttgtgcgtatcctttccattcatcctcaccctctgaggtccccattcattacacggcagtctcctatcagatcccccaacttcatttccacctccacttcgggacccccaaaagatctgtcagaaactgcagctcaggctctgcttctcccaccaggctcttgtaaggtttcgcctggtggtgctttacaatcctgtcagtgcttagaggctgtaacacatttatttatttatttatttatttatttatttatttatttatttatttattttgagatgtagtattgctctgtcccccaggttggagtgcagtggggcaatctcggctcactgcaacctgcgcctcctggattcaagcgattctcttgcctcagcctcccgagtaggtgggattacaggcacccaccaccatgtctggcttatttttgtatttttagtagagacagggtttcaccacattggccaggctggtctcaaactcctgacttcaagtgatccaccttcctcagcctcccaaagtgctgggattacaggcgtaagccaccatgcctggcctaataaatttatttttaacattttatctagcattttaaattattttcagcaggtctttagataactagtccactataactagaagctggaaatcatttttatctcattttatttaatttaaaatttaacatttattttattattttattttgacacagggtcttgctttgtcactgaggctgaggtgcaatggtgtgatcatggctcactgcagcctcaacctcccaggctcatgggatcctcccacctcggcttcccgagtagttggaactatagtcacatgccaccacacctggataatctttttgtatttttgggagagaaggggttttgccccgttgcccaggctggtcttgaactctggactcaagcaatatgcctgcctcacctaccaaagggctgggattacaagtatcagccaccatgcccagccaagctggaaatcttacaattactatattaggataaattcctgggacgatgaattactgccaaagaatagaataacactttatgttttgacacaaactgtggaacttcctcactgtatactcctaccttttatgtatgatagtacctacttcctgagacccaatcagcccaaagcattattctttaaaatcactcccaacctagctgacaaagctatttcaccatgactttaatttatgtttccacaatgagtggcatggatgatgaccctcttccttctttccttcgctttctcctggggatgcatcccttgtgtactgattcgcaagcgccctctcactcctttagcatacagaaaacacctttgttataggttgcaattttccccaaatttgtcatttgactcttaatttatgttgacttttgccatacaaatgttaaaaacgtttatgtattcaaatccatcattattttcctttagggtttctggtcttgctgtcacataaagtatttcattattaactctattacatcacacatttttaccctgggccactatgtactggcttaaggatctatgttaaaatacttaacacttcatttttttcccctagaggagtagatttttagaggtttataagtatataatactcttcgtgattaatgaaatgaaggggaaaggccaacatcacaggcagaaacacattaagtttctcaccagtgcaggatccaagaatagcaaatacctcagcttcctgcttctgtatcctcaggcaagagccaccccagaggaaaagcaagtgtcccacccgctccagagctgggatcagcacccaagtaagcatgagactacccaggctactctaaattcttctcaagcctgtctgggtcattcattagctttgtcacgtcaggcaaatttcttcaagtctcagacctcaaacggtgtcaatatcaaataggatttggtaggggaatttctcaggtccttctgactgtaacagttaagaaagctctgaatcacactatggaagttaatttagcgtgaaaggttaaaaacggtcacacatatatacagtaccaaaccaaaactaagaaagtaaattctgatggtttaatatctgaaataactctattttctctagaaattattcacttatttctgacattgtgacttatcctatgagctgaaaagtgatgcggtcttcatgtgtaagtgtattgtacatgtgcatatacacacacatttttcttcatgtgtaagtgtattgtgtatgtgcatacacacacacatttttcagataaacaagctgtggtacctccatactagggaatactactcagaaataaaaaggtacaatggctcatgcctgtaatcccagcactttgggagactgaggtgggtggatcacctgagttcaggagttcaagaccagcctggccaacatggcgaaaccatatctctactaaaaatacgaaaaataaaaaaataaataaaaaattagtcaggtgtggtggcggacgcctgtaatcccagctactcgggaggctgaggcaggacaatcgcttgaacccaggaggtgaaggttgcagtgagctgagatcgcaccactgcactccagcctgggtgacacagcgagattccgtttaaaaagaaggtacactggaaaggggcggcatgagggaggccatggtgggagatggttctgtatttcgactgtggtgttacacatgtaatacagtgacacagtactacatgcacacgctcaccaatgccagtctcctggttttcatcccgtgctataatcctgtaagatgtcatcattggggggagaccaggtgacacacacaaggactatctgtgtaacttcctgtgaatctgtaattagttcaaaatgaaaaattgaaaaaaagaaaagggagttggaaaaaacgggcgcctggcgataagactggtacgaatcaaaagatgcttattcccaaagaaaaataaagcagcaaagaatgtcaatagccaactaagaagagaataaatgtaaatggccaataaacatatgaaaagaaccaatgattatgaaaagttcgacttaccaagctggcaaaacttacagaaaactaaacgtataaacatattatatctctgtctgtctgtctatctatggaagactaagcatatagaagtctaaagccatatagctgaggtatggggaaaatcctctcatgcacctggtaggggctggtgcgatttgctgactttagttttcactaattaaacactaatcgaatgcttgagaagtcagctagtccgtgaccagcacagaccgggactgatgctgtccctggggcaggtgtctctgagctgctataacctctccctgccccattcaagatggcgactctgggcatccccaacccaccatgcccatctcgagacctgaaggaacgatgggtgatggccttcatggggagactggggactctgggtctgaaacatgtctcctggcagagagccaagcccccggcaaggaagacaccagatgccactgtgagtgacaccatgaacacggggttcagctctgtctgctctgccctccaggggcagggtccaaacacacagaggcagcctgggcgtactcacaaagacaagcggtgggctccccagtaagcaccccaaatccacagacagaacacaacaaccctggggctcgctcttcctcagggcggacacaccagcaatcctgaagctgtgtgagcaataggcgaggtggcctgtgaatccctcccggttctagggtgtctggaaactgatggcagctcaccgcctccgtcaccgtcacctacattacttcaagagcctccatgggaccctcacttttattatcaacatggctaccaacgcaatcctatttaagtgtcagtcaaaccacagcacgcctctgaccaattcctaagtccttccggcagccctcaggcgcccctccacaggcaccacgagctgtcgcctgtcacccaccgctctggcccacctcccgtcagcctccctgctgcactctggagcacgaagcctgctcccgcctaggggcctctgcgcttgccattcttccagctacaacactcttctcccttcccccaggcacccaccatcttctgagctttccgggaaacgccactctgggaagctacgttggtgagagctaaagccaagacacagaggcttaaacaagataggctgaaggccgcttccgttgtgggtccacgctgactgctcagattcttgacactggccaggcatcgggaagggggagaggccgggggtaagtgtcatttcgcccctacagcaaggcccagcactcagtcccacggctatgctaaaccacaagaaggcagaaaatgtagtccagatttgtggtcatcttctcaactctgttaccacggcagagagaaaacaaatgccagggccgggcaccatggctcacgcctggaatcccagagctttggaagccaaggcaggaggatcacctgaggtcaagagttggagaccagcatggccaatgtagtgaaaccctatctctactaaaaatacaaaaaattagccgggcatggtggcaggcgcctgtaatcccagctgctcgtgggaggctgagggagaatcgcttgaacccaggaggcagaggttgcagtgagctgagattgtgccactgcactccagcctgggcaacagggcgagactgtctccaaaaaaaaaaacaaatgccagcaaaaccagagagccaagaatatgtggaagctgctcccatggccaccccatggatccatccaggctcccccaggctgctcaacagctcctccccgggacagtttgctggctgtgagtccacgccgcacagcctgccttgtcgctgtggccaggtaactgtgttcccgttcaggagacttctgaggatgtgttggacggcacgtctaggaagtcactctaaaagaagaggggagctctccctccccaccctcctctggctcatatgcagctgaggacaggagcgcacactctggaccgagcaagaaaagacacaacttatattcacaacttagttactacatgtaattgactggccacaatttcaaaagtaagtcatgaaaaacaataagtagttccacttattcaggcaattctgtacctaaagatgctaccggcctgctcacaggccatgtttggaggaaagttagatagtgaggatattaactaggtaggaagcaaagagctgtgcagccaggaaagaagcagatggggtgatgaacagtaggacatgagggtaaggatcaagactacctctgccctgctatgaccacactgcctctctatggagcccaggagagctcagccggccttgccccatcttacctcccctttttttttctgacagggtcttgttgcacacacacgttgcacaggctggagtgcagtggcgtgatctctgctcactgcaacctccatccctgggctcaagcgattctcctgcctcagcctccagagtagctgggattacaggcgccccaccaccatgcatggctaatttttgtatttttagtagaggcggggttttgccatgttggccagggtggtcttgaactgacctcaagtgatccacctgccttggcctcccaaagtgctcccgaagtacaggcgtgagccaccgtgcccggaccccttcaggcatctttttttttttttttttttttgagacggagtctcgctctgtcgcccaggctggagtgcagtggcgggatctcggctcactgcaagctccgcctcccgggttcacgccattctcctgcctcagcctcccaagtagctgggactacaggcgcccgccactacgcccggctaattttttgtatttttagtagagacggggtttcaccgttttagccgggatggtctcgatctcctgacctcgtgatccgcccgcctcggcctcccaaagtgctgggattacaggcgtgagccaccgcgcccggccccttcaggcatcttttacatgagtcacagtgatttctggaaaaacagcaactcagatctgtgatttactgctctgacacctcagtggtgcctcactactccccataggtgagttcaaactgcttggtacatgtggccgcagagaacgctgtgacctctgagacctgcctgcacccaccttacagcacacagaccgggtggcaacatcccacccactgctccagttaggcggcccctacttctccagtggtgaggacagggatccagagttcatccatgcctaaaccaaccacgcacagcatctccctggccatgtgccaggtcccctccttgctcctggtggtgatgtgtgtgtgtgaggcctcattctgctgccatcattttgcagccacagaggaagccaggccaaaaaggaaccagcacagagaagcccaggaaagcccaggaaagggcagagaaatagctcacagtgcacataaagctaccgcctgtgtcagtttttggctcacaaagcgcctctggttaagccagtttgagctggggtttctgtgcttgcatccacgtgcatgcatactcttcttgcctaaagcctgctcaactctgcagggcagcctctggctgagcaagcttctgccctgccggctgctttcccagtccctgcctgtgtctgctccctctgccacctcactccgcactgtctcctgggtcattctacctgcctttagaaaagtctcctccaaagcacctctgacctcctcctgccggatagaattgtctgcttttttcctttatgcttaacatagcctgattatttttcaattacatattttttgagacagggtctcgctttgttgcccaggctgcaatcagtgcagtggcgcgatctcagctcactgtagcctggaactcctgggctcaagtgaacctcctacctcagccaccgaatagctggaactacaggcgcgcaacaccttgtctaacctcaattatatttcttaccacatttataacaattatttgcttgcatgtctgtctgtcctaccggctatgtgaggaaatgagacctgacttcagcacagggcctggcacacagaaaggactcactgaaagaatacccttccgtggcacagaaggaggactatgacatacaaatccaggtcacattcaggtcaggatccacacaccaaagacactgatatatctatatcataccattctaattaactagatcctaaaattcaaaggtacaccaaggctgggcctggtggtatgcacctgtaatcccagcactttggaagcccaaggcaggaggattgctagagcccaggagtttgagactagcctgggcaacatagtaagacctcaatgctatgaaaaagaaaaagtaaaaattagccaggtgtggtggcacatgcctgtgatcccaactactcagtaggctgaggtgggtggtttgcctgagcccaggagatccaggctgcagtgagctatgaccacactagtgtactccggcctggaaggcagagcaagattgtccctttaaaaaaaaaaaaaaaaggtaaagaaataaatggtatactcaaaagtagataattcatccacatttgtagtatgtaggcaatatcatccacatactatattataagcacattagttaatgagcaagctatatttaaaaatgctaaattttattttattaaaaaagaggacagacaagaagataatatttatattagttataccgatgaccaaagtctttctgttgagcatcctgctctgtcttacttaactgtgttttggaagataaggtctaacatggcgagatcatcttccttttaactgagccacagaagtgatgctcatggggtgtctgctgtctgtgaccagcagtggacagcaatggccaggcatggcaaggggccagtggggaaggcggccaggctgcctcccctatggaaagggaagatttccatcccccaccccggcccaccctgctcctctcagaggagaaagggtcgtcacaaggtaatcaccagacacagccttttttcctcctctttttgtttctatctctgactggaatggcaggaaaaagcaagacggcagagggaacagggaggcgcctagtacctggctgacagcaattctcaaagcagctgcagctcttcacagggactgtcaaatgctgtcagctggggaagaaagacaagcaaaaaacaaggtgatgaagcattgccctagaaaagctttgacactcaggaaaagattggaagagaaacaagggtctactgcaggggtgggggagggagccctggtaacggtgacttcagatgggtatggtctttcagttttgctgtaattgtgtattttgacaacaacgactattagggtcctactatctagctattttaataaaatgctccatcattttttttgaagaataaaaagaagggcaaatgtataaagtataggaataacagtcatgcacccaccacccaataaacaagaatttcacatcatcatctctgcatctgattattacagactttacaaatgcatcactgactacaacagtatattttctgtatcttcacaaagtctcatggtctgaagcataagatcgaaccaaagggacgactactgacccacctgtggccaccttaccctaatcacccgccaagtgcacgtctagattaaaagctcactcgctggagacaggctcatgtttggtcttcttcactgctatatccccagcatgtagcaccgggtctcacacagtaggtgatccatgaatgcagaatgaatgaatgaatgagtgaagaaggggagaaacaagcagactgggctttgaggcccaaatttctcacagtgattaccaagatgatgtggcctcaggcacagcataactggtacgggcttacttccatgtcgtgacaatacaagggcttgacttcctaaattgggaggtcccttccagcactgacaccctgcactgacggaacagggcaaagacagaagcctgtcaaagctgctgcaccatgccgaatcccagacagaagcctcactcagtacgatcagccccagacacttctgcttccttctttggaaaatcctcaatttccatccaagttctaaatgaatgagaatcttctttcccagactctgtgagtgtatggggaaaaggtgtaaacctcaatttcacattgagatactgacatgtatttcccaattgtttcttccagccctgctctttaggagattaaaatttcctttctaccgcaaccacatcttccactctcttttgattcttttaccttaactgttaaagttaacttgagaaggaatgtgcagatggaaaggggctagtaaaaacgtcatccttaagatgccctggaggacattaacatttacaggcaaaagcctgaggagaaacaggctatttgcagggtctcaatgtatctccctaagatatgtgttaacaacacagagaaaatactgacttcccagtggagaaaggtggccaacagtgcctcaaccaagcaacccaggcttgcatcaccagccactggacaatatcacgcacttcctgatcagatgatctgagcagggctcaacggcacgcctgcggtttctgtgccaaaaaaatgcatcccctcatcctgatgacgagaaaataccagacaaacccaaacaggaagattctacacaatacctggccagtgctctggacatgtcaaggtcatgaaaggcaaggaaagatcaaggagctatcatggactgcaagagaccaaggggacacaatgactaaacacaatgggggattccaggccaggatccagcagacaggagcgcgagaggaagcagcggacaggacgcgagaggaagcagcggacaggacgcgagaggaagcagcggacaggagcgcaagaggaaaggtgggtcacattcagacaaggtctacagttaattgatgctttcataccgatgtcaacttcttagttttaatagttgtatagtggttaagatgttaacattagggggacttgggagaagaatataaggaaattgaactgaggggactattagcagactatatagcacctctcagatgattgagaaaaataaaaattactctgcaggaaaaggatgggtaaaagatatgaatagggtggggcatggtggctcacacctgaaatcccagcactttgggaggccgaggcgggtggatcacctgaggccaggagttcgagaccagcctggccaacatggtaaaactccatctccactaaaaaatataaaaattagctggtgtggtggtgggtgcctacagtctctgctactcgggaggctgaggtgggagaatcacttgaatccagaggtggaggttgcagtgagctgagatggcgccactgcactccaggctgggcaacagcgcgagactccatctcaaaaaaaaaaaaaaaaaggaaaaaaaaagacgtttccaatagcaaaatatgaaaaacagttcaaaagtacctcaatgaaagaaggaatggatcctagtatctttccacagtggagcatcagacagcagtgaaaagggaagaaccgctgctatgtgcctcgcctgatgaaattccaacatgtggagtgaaaaaggcaagtcacagaagcatatatactatacactaagaaatgacttatatgaaggttaagaatcagtaaaactcaagactgtcgtgtttacaaataataaatgggtattatggcaaaatcataagaacggcaaaggattcatgacttcaacttgactctgggtgctaagggggcaaacggctgtgagagtgagaggcatttctggataccctgggtgtgtattaatatcagctgtgcacatttatgctggttatcagaaaaattgtacattttactttatatacggttaattttgaaaggtagaaaaaaacaaaaagcaaacaggcaaaaccccccagattttctggttatagattcagaccccaaatgaatctaaataactgggctttgtgaagtttttagaccttaaaacgaaaggaacaaatctgaagggaacaactgggaggagttggatttgcttccgaggcgctgatctgaaggcgttcgtgagttgcccatacccacaggtccaaagtgggaagctgttgtggggggtgttatttcctactatgaacaagatctctaaaaaaaactaaatttctcgggttgtgccaatgctgatgattctaagaaccctccgtattcccagaagaaagctattgatcttacctgagtggctcttgctccttcccctcttgagccttttatatagcatctgcctccatcccgtgttttggttgttgatcattacaacttacggtgatttagagcttgcttggactgttacacagtttttaaggaaattcaactaacggtccaaaatagtcatgtaaaaaacacactatcaggtgcccagcaagaaggcctactcactcaccagctgaaactcgcttctccggctgaaagcctccctgatgccagaatccctccagagtgcgctcagggccgggacgtacagctggaaggtggccggctccacaggcagccccgccttgttctcgaaggccatcaggaacatcccatgcttctcattttcagaatactgccaaggaatgccaagcttatctcgtgcatcaacaagaacccttgagccctagaaaataaaagaaagaagagaggatttaattgcattccaaagactaaaccacgctagagaagctcaaaatgggcatccattgtcataacgcagaaaactcacaagctctgagctgtgcagcctgagtctgtctcttggtttgtttgttgtgatgtggaaagtcttaactctcagcagtataacctcaccaagacagacgcacatggccgagagcagtggctcacactgtgagcctcccctttgggaggccaaagagggaggactgctggaacacaggagtctgagaccggcctgggcaacagagcaagaccctgcttctacaaaaaattaaatcaaattaaaaacagctgggcttggtggtggcacacctgtagtctcagctgagcggggaggattgcttgagcccaggaggtcaaggctacggttatctatgattgctgcactatattctaggctgggcaacagagcaagaccctgtttcaaaaaaaaaaaaagaaaagaaaaaagaaaaaaaagaaaacagatgtacataagcaccacagaaagaagtctgctttctgctatcattcatttgcaaagctactggaaaaaagacaactgggcggggaggaggtggcaacaatttcagaaaatttcactggaaaatgaagtgtatcagtaaaaaaacaacttttttttttttttttttcttagatggagtttcactctttttgccctggcctggagtgcaatggagtgatctcggctcactgcaacctccgcctcccaggttcaagcaattctcctgcctcagcctcctaagtagctaggattacaggtacctgccaccaggcccggctaattttttatttttagctgagattacagaccaccacggactgctaatttttgtatttttagtagagaggggggttccaccatgttgtccagcctggtctcgaactcctgacctcagctgatccgcccgcctcagcctccccgccaaaaaaacaatgttttaacaacaactatagtagcctccaccccttatccgtggcataagttccaagaccctcagtggatgtctgaacggtaccaagccctacctgtattgtttttaaagtttaatttaatttatgaattaggcacagtaagagattaataatagctaataataaaatacaacaattataacaatatactgtcatgaaagttaagtaaatatggtctctccttctgtctctcaaatgtggtatcaccgtccgcgcctattttccgttggcggctggctgtggataacgggagatgactgtactgccaagagtactaccagcgctactattgtcatcatcactgaaatctggcagctcctctattccaaaagatacaactgcttcttccagcttaaaacgggtgggaaaacatacaaatccaggcagtcagcagtcatgagacaggaaaagactaaaatacgacaagccaagtagcccgcccaccaaaacgggagccaggggatcatgttctagatttaacgtcaccatcgtttgtgatgagaaactacttttcattcttttgcttgtttcctcattgttaaagataaagttaatgttgttctgccccttcttacctcatcaacagggtcaaagggatgaagaaataactaacatagtattagggaatgcagccagcctttggaaaatattctctcagcaaaaacagcaccccctgagcagttaggaggtctgttccaccatccttagactaatgtttcgaaatcagcaaggcagtgtttatgagaacttctgtgttcttctgaggggcacactgcatactctctggtatggtctacactgggggtatacagagtggtcaagggccctgagaaggctatcaagtacacatctgtccatctggaaaagccttctcatctcagagcaatctgagggactcaggccagctgagagcagcatcccatcctccaggacagagaaaaccagggtcacctgctcactaggcacttatctatgttccttttttggagactgggtcttgctctgtcacccaggctggagtgcagtggcatgaacatggctcactgcaatctcgaccttctgggctcaagtgatccttgcccgtagcctctcaaggagctgggaccacaggcatgcctcgttacgcccggctaattttaagattttcgtagagtcagggtctcactatattgcccaggctagtctcaaactcctgagctcaactgatcctctggccttagccttccaaagcactaggaattacaggtgtgagccactgcatccggcctttttttttttttcctttttaaataacagttttactgtgctataatccatgtaccatataactcatcaatttgaagtgtacaacttaatgatttttagttggcacttatcctaaaaatcttcatttctgacacccagggcagagcagatgaatccattctgcctccttcatctctctcctgcagcatcaatttggtgcctataacttccacttctgccttgaaccactgagtcagacgtaatgatgaccaaagagtagttgaaagtctcctccagacccagctgaccaggacggtctggttagagatgctccctgattttcccctcaggaccttgtctgtctgccgttggagaccatgcctagttctaccaatccacaaacatttgttcagtgtgtttgtttgtgggggaaacaaactttaagaagcagtatctgacccccagaaactcagagtctggctagaaagacaaatgtatggataaaaaaaatacttaccacccactcatgattttaaaaaacctttgcaaactaggaacagagaaatgcttcaacttgataaagaacactgacaaaaaaacatacagctaacctcataattaatgtgaaagactgaatgctttccctccaacactaggaaaagacaaagatgcctacttctgctactgctattcaacatggttctggaagttctagccagtgcgacaaggtaggaaaatgaaataaaagatcacacagctcaggaaaagcaggggggaaaacaaatagattagacacacaaaaaaagaaaacacacaactaaacccatttgcagataaaaagatgatctatgttgaaaatcccaaagtaatctaccaaaaaaactcctagaataaacaaatgaatccagaatagttgcaggatataatgtcaacacacgaaattcaattgtctttctatatactagcaatgaacatgtggaaagtgaaatgaaagatgtactactactaactatcactaaaaaaacgaaacaggtataaatctaacaaaatatgtgtaggacttatgtgctgaaaactgcaaaatgttgaggaaagaaattttcaaaatctaatagatataccacggtcacgaattagaagattcaacacggtaccaatatccttaaattaataaacaggtttagcacaatttccataaaatcccagcaggatcttttgtagatataaatatgattatttgaaaatttatatgaaaaagcattaaattagctaaagcaactttgaaaaagaaaagtgggaacaatcagtctatctgattttaagacttattatatagctatgataatcaagactgtgtggtattggtgaggtgacagacccacagatcaatggaacataacagagaacccagggatagcccctgatacagctaggtaatttttgtaaaagtgcaaaagcaattaaaaagaggaagcctggtcttttcaacaaacgctgttggaggaagtggacttccacaggtaaagaaaattggggggagcgggggagggggtggggaagaaccttgacctaaacctcacagcttatacaaaatcaaatcaaaatgtagaactatatataacataggagaatatcttcaggatgtagggtgtgctcaaagttcttagatgtgactccaaatacatgattcacacgagaaaaattatcaataaattgaacttgatgaaaacgaaaatattttgctccgccaaagaccctcttaagaggctgaaaagaagctatgaactgggagaaaatatttgccaaccacacatctgccatatctgacaaaggactcatttagaatatacaaggacattcaaaactcaacagttaggccaggcacagtagctcacgcctgtaatcccaacactttgtgaggctgaggggagaggatcacttggggccagaagttcgagaccagcctgggcaacatagtgagacctcgtctctacaaaaatatcaaacaaattaggcaggcatggtggcacacgctgatagttccagctactcaggaggctgaggcatgaagatagcttgagcccaagagtttgaggttacagtgagctatgacagtgccactgcactccagcctgggtgacagagcaagatcctgagatacatacatacatactcaacagtttaaaaagcaaacaaatccagttagaaaatgggcaaaattcagcaggtcacagaatgaaatgaagagaaaaaaaaaattttttaaagaaaatgggcaagacatgatgagatatttcactggagaacatatataggcagcaaatacacaagtgaaaaagatgttcaagatcaccagccatcaggaaaaagcagatcgagacctcagtaagatactgctgtacacctgttaaagcagctaaaaaaccaaccaccaaaccaagacaaccagcggcaacaccaagcggaggtgaggaggcggagaccccggacctctcatacactgctagtgggaatgtcaaatggcacaaactagaaaacagttgggtggatttataactactaaaaatgcaactcccatacagcctagcagctgtacttgggtatttatctcagaaatttgaaagctaagtccacacaaaaccctgtaatgttcacagcagctctgttcatcatagccccaaactggaagcaagctgtggtgcaccataccatggaccattacccagcaacaaatgggagttcactacggaaatgcaacaacttggatgaagctctaggatgttatgttaaacgaaaagtcagtctcaaaagatcacgcactatgcgattctgtttaataacattcttgaggtgacaagattacagagatggacaagagattcatggttgccaggggttagtaatgggaaagacagggggagaagtgactagaaaggggcaacacgaggagatctttgtggtctggactgtggtggtggttacagaaacctacacaggtgaggaaagggcgcacaaccacacacagtgtcccaaagcccgtctcctgacttcaacagcatactgaaattatgtctgtcataaccactgggaaaaactgcctgcctctctgtactatctttgcaacctcctgtgaacctatacttatttcaaaataaaaagtttttaaaaagttaactagcgaccacggcaatgtaagttccaacgatgtgatgtggagagggagggttagcagaggccgaaggcaaagagatagtagggaagggaggcttgctaaaaccctaactggaggtgggcctcagacggagctttccgaagggtgggttcatctgagcgagtggcagtggtggactggaatctacctagagggaaaatgtgacttgaataaactctccactttccttcctcccggctcccccactgtgattcctcctccgggtcctcatctccccacttcctttgactacaccacaccaaactcttgcctttccaaaaggacaaaaccaaaaaggttcaagaacccaaggaaacaaaggcaattcctcttttccccactatgcacaacaaaaactatctcggcacggagaaggtagcacacagatttctctggcgaggtctcgggcaaagggtctcggtgcctttgtacaaatcagaaaaacgctctccatcatccaggcagatgcggcccagcctggcaacagtggcttggatggggtttcagcctccatgccctcccaatcaagtcaccaaccctcccgctatccgggaaggccctgctcgtccaactcaaatacagaaattgggtccgacccaccaggtatctattcaggtgctatttttacaaatgaaaagtttagcttcacaaggagtacaatctcactcagaagttaaatcaataacccctaggaagtttcatttttatgtcaaagacgaagtcagggggccaggtaggacttggaaggccaaaggtcacttacgaagactgcaggactgcacacaccaggccttccccaactatcagggtgaacataggtttggcttaaaaacacacacacgcaaaactggcccatgcaacagcagtctattcccaccgcacaatccgcccaagcaggctggagctggtccaaatgaactgcacccaaccacaagaaaagactcctcctttccctttttcaaaacacaagaaaggtggctaaactactgatgagctttgaacagttaagtagtagttttgtaagctttgtagttacagtccattttcccttcctttgaaggaaaaaaggcattaaaaaaaaaagatgtctctcttttgcccttttacatttattctagtcaaaaactgctctctgccaactttgttctgaaaatccacatctgagttccagcgaagttttctacttggggacatttggctaaattctgagtccccttttcttcctttttagagagagacgtaagctctctctggagtttaaagcctgtaacaataatgtatttaccgtacttttgcagaactgatagttacacttttaccattgttatatagaattgctaaagtcttaaaagtaaaatactagtataggaggcatattataataaacctcttactcctgtccttttccaatgaaagaccaattttctaaaacacaaaagccaagaaaatcctaaaactcacatacacttaaaataaataagaacgacaactcattcaagtctctttaatagctaagagaaaaatccttttttcagtaatggtattactgaagtattaattgtttgaataaccatacattttatttggttacccaaatataaacggttaaagtctcaagcagtttgatgacttcatctcaatacaatgtcacacttcaaactgttcagacagcatatttttaagacaacttataaatccagcaacttaaacttctagtcaaagtatagattccctctctgctggggatgtagattttttttgggggggtggggggtggggttcaattttgctggatgaagaccaaaaactgcaaatcctgttatctcatttcaaaatagattatgttagtttagcccctaatcaaaccaaatcttttaagattagtcattccttagtaaaatcttcccacaataaataccaaagctacgatagacataaaatgctttaagataatatgagcctttttctacaagatgaaacagttccattaagacaaactgaagattctggatgttcactcgggcaacagcatgtggacttggaaagctctgttttttaaaaacccactcggctgagttgtttgcctttggccaccatccaaataaaagaaacgctgccagaagtgtaaacaggatgcatttctttacattgatgaatccagcaaacaaagacagcgcctcttagttcctctcgaaaactgaagtgcaagataccttttagtgtaaaggtcagcgagaaactgacgaagggaggcagtaagccgtcaaaccagccatcagagcctctgccatttcacagcgcagccctggccccaccataactccgcggatttgccttccgcaacaaatgcactgccgtacgggatcaggcctattatttctctaagaaagccccctcttggctctgccagtgactataccgagggctcacctcaggcaatgaaaagtggtgggtaacgaatggggaaaacccaaaaggcggtaaacttggctcctgctatgggagaactttcaaaacaagcgtagcagcaagacagagcacgagcagataagcgacagtctcagatgcagagtacagaggccagccccataactggaaggacaggaccgtcggaggacagccagaatcgccaccgctggtgaggcctcgctcacagacaggctgtggagagctaagaagtctgtgtgagaaaggggacgatcgagggctttggaaaaggagaatggcaaggtctgaggctgcctgcaggtcccgtggcaggtgggacaggaggcagggaaggagcagctaaagcaggagagtgatcaggagccccctaagtgctctcaccccaagtgctctcaataaaagatggagagatccaaaaccaggaattcaccaaacctgcagagcacggagagcagtgagggccctgttgtgtaagcacaatacccaccagttctcccaagtcaggtccacaggaggggatggcttagaaggggtgacatttaggtaggttttcaacaaatttagttcagttggacagtgggaaatccaagctaagcttctcaagaggagatggaactgcagagaaaactctgggtttaggaatggcataggagaagcaaattatcatcattagcttttttcagctgccttgaaaaggttttcctaaaagtccaaaacaaaacaaaacaaaacaaacaaacaaaaaaacaactccaaaccaatccagatttccccagatctcctgaactggaaagtgaaaatccagggctccatttcaaaactcacaagccagcaggctggaaactcctggaatcatctccccaacccccacccgccagccatggccatgggcagaccaacttcttcctctcctgttcttccaggggtcaggataagtctcggaatctcccttcactaaaaatttcactacatgacaaacactagtacaagggggaacgaaatcgtcctcttaagtacagaaaagatcagcaaaacttgagaacacaaacacacaaaatatcattctaagggggaaaagcttgcacacactatcaacaggtaacagcttcatgtgctaattcagtgttttcgaaattcaagtcaggatctgcattgtgaaatcatttagtaggcattttaaaaaggaaaagaatatactggtaactaactgaatagactgcaaataataaaggtaagtgtttcaaagaatttgttttagcagagacagctatatatagacgggtgtgtgtgtatgcgtaaacccataaacccataaacacacacgcgtgtacatacaccgggttcctctggactatggtctgagtgccactgggccagactcttgtagatgagcctgctacaaggctggctttccttggtcccaccacttcaaagccaataggactgggctgagtgtcaaaagtccaaacagtaacaagttgggttttgtgaaaaactgataagagtgcaaagaaactgtgtgaggaggtgtgagaaaatggtgaaatctttgtcctctgggggcagtgtcactaggttggttttcattaaacatattcttggcccattcgttggggccatcttggattgcatggtgaggtctgggaatcacagagctaccactcaacattttctaccactaaagacgttgaagagagctgggcgtgatggcttaagcctgtaatcctagcgctttgggaagccgaggcgggaggatctgttgagcccaggagttggagaccagcctggacaacttaccgagaccctatctctattaaaataaattaaaaaaaaaaagatattgaagaggatacgcagctaatgttcattttagaaaggctgcttttgattatcaaacatgatgtgtgcagcgcatggtggtggtggcacccccaggcagtgttctttagaaccctcctcctgatccaacctggtcaagctggggcctcagcacactgtggtaaataaaggcccagagcctttccacaaagcctttaaacaccgaccaaggtgccaaataaataagcagatgcagacatgcataaaattcatgccagtctatcaaccaaaaggctgcttcagagaggccataacaatctgcgttcatgggactaagcgcctgccatgtgaacgacactgtgttaagtactcactgtccattagctcatttagtctttataaataactctgcgaggaatagcattatgcccattttacaaatgagaaagcggaagctcaaaatcacacagttatcaagcctgaccgatttagtttaagctagagattttctttttttttgtagagacagggtcacactgtgtcccccaggctggagtgcagtggcgcaatcaaagctcactgcagccttgaccgcgcgggctcaagctagagatttttcagctctgttctacactgctgtgagtatctggagagataagggagcagaggaacaggcaggaggcagaagatgcctgggctgccgcctgctctcacgcagcttacagcaggcacggagactagagccagagctgagctgacctctgaggacccaacacttctgaaattctctagaacattttttaaaaatagtaattaaaatctggaagtatgggatatactgttaagcctggctacattagaagacattttgtgcattcagacactacttgagtctaatatctccagacactgaaaacactcactcatctacgctatcttggcagcccagcaagagaccatctaatggtggctctgtcccagccacgagggccaccgagcagtggacgtgcggcccagctgaactgagaggtattataaatacatactggatcacaaagagtacaaaaagaacacgtaaacttcttttgtttatactgattacatgttgcaattgtaatattttggatatgttggattcaataaaatctattattaaaatcatttttctttcgttctttctccttaatgtggctactagaaaatctgaagtacacacgtgccttacatttgtggctcacattcgatttgctattggacagcattgctgtaggataacatatctaaaagaatttgtcttggtcgggggcggtggctcacgcctgtaatcccagcactttgggaagccaaggcaggcagatcacctgaggtcaggagttcgagaccagcctggccaacatggtgaaaccctatctctactaaaaacacaaaaattagttgggtgtgggcacatggtggcaggtgcctgtaatcccagctactcgggaggcagaggttgcagtgagctgagattgcaccactgcagcactccagcctgggggatagagcgagactctgtctcaaaaaaaaaaaaaaaaaaaaagaaaaagaaaaaagaagaaagaacttgtctttttctgattataaaagtgtatttttagtgcaaaaaatagaggaaatatagaaatacataaagaagaaaattaaatccttaaaaatatcactatctagaaataacttattaacatctaggaatgttatctgtcttattctttacagaacattttgtaacactttaaaatttttctagcgatgtatcgtaaacactttcctatgtcattcaagatttcaagatctgtaatggctgcagagtagtccgacatgtgggacatgctaagattgaggtaatccctatggctggacatcggaattctttccagtgtatggaaagaataaacaacgatgcaaggaactccttgatacatccctattttcacatatatggctattttcttgtgacaaattcctagatgttgaattataaaactgctgggtcaaaaaagtatacacacatttttgaggttttgataaatattactaaactgttttccagaaaggttctgccaatttacacatttatgtttaataacttttaattttcctttattttcccccaaattgttttttagttgatctatttgcttcacgaaaattgtcctccaataatatctaagcagtcatgacctcaaaccacagctcaaagagaaatcaggataactagcaactgaaaatgaggaaaatttagtgtatgtatactgacaactgaaaattagaaaaaatggaatagacatttggcttctctacttcaaataagcttttatactgatttttatactttattttcctctaagtcccattataatacaataataagtaataaagtaccaattagtaataaaaatgcttaaatttcacaaacatgtttgaatttctagtctcttgtttccagtaagaaaactaggctcagtcaacacttccaataaaacgtttcatgaaggtataaagaacaatttaaaacatttagcctgagttcttagaagtttcaaaatcaagagagccttgaatttgatgggagatttactattaattactgtctccataaacagaaatctctttgaattaatgagcattaaaataaggtataagagagaaaaaaaaaaaaacctagccaggataacacagcagcttgctcactgttctcatccgttgcctctaagactatctggaggaaagttcaaacttgcgataagaccaaatggaaaaaagctggaagaagtaaatttaagtagtaaattactactgcagaaaataaactcaatggtaacttcaacagcaccaaaaacgcacttggacatggcaataattaaatatcagcatcaggcagcctcactaaacaagacgctgcagcgtttcaaattaaggggccaaccttaggcacacacacgaccgaagagcagccgctgagctcatgaaaaacctgttcgcgcagaaaccgctctgtgccccgtggaggagctacgatgaattattaggtgaaagtaccacaagctccgtgatcattttgggcgcttcctccacttaggactcaggctgctgcttaatgaagtcctgctctgcaggcatccatcttctcttctatggactgcatgggtaactgtttagacaactaaacggaaaatcttaatttatgcttcatttgcaattacagagttggcctctgcaagtttcaatatctctttcgggaatctgtgaacatgtttccttctcacgcatacccaactccctcctgtaagcagtgaccatcatgagtagtgctacccgacacccacctagagcagcgccttcagtgcttacggcctgcacttgggttaagccagagctggcctacccaggccctgctaccatgctgcctgaaaagctgcttctgcaccttctgcagatcagcaagggtgtgggccgagctgactgtggccttggaggctgtctgtccctgcaggctggccactggctgtagtaggagagtgcccaggtgctgtgggttaccctggaccatcctgtgggcctgaatttggatgggatggagagggacctgggccgcacaggaggacctcactccccacagagcagcagcggcctgcagctaggggagatgcaccatcctgaggtctggcccagcctgtcagccaatgccgtggttctaccttccagagacagctacaatttccctacttcctgctgctcccatggctctcacttgggtccggccaccaccatctctcacctggattatggcaagtcttctaattggctgctttgtgtccacacttgtccccttcagtctactgtcaaaaccagtggtcaagttagcctgctaagcctaggtcagctcttatcacccgctttgttcaaaaccctacaaggctcccatctcattcatggcaaaaactcaggtcctcaaagaggcacatcctcacttctgcctcaggcctttgcacttctggttcctgacaactgaaaccctttgccccggatagccgcacggctcacttcctcaatgctcagtgaggactggggcagggaagcttctcagggtggcctgcccttggccatcttatccaaaactgcaccccaggcccatccttcccacgctccatcctcgctttacttccttgaccacttccggctggctacccgccttcagagtccactcagcatctcctgtatgattctctccccaccgagcacaagccccacaaggacagggctctgctctgttcacacccgtgtccccagggccggcacagagcagaggctctacctgttggcaggatgaactaagggaccccaggtcctcatccgcaaagtaagggcagcagtcctacctcatacctgcagtgaggagcactcaagtaacaggtgttttatattagatagtcattagatctgtcttgtaccaaagttgataaaaaatacacaaaccaaacatcattagcgtttcaatgtatttttcattggaaattccaccctatgatgactcattattgacattaatacataaatattgccccatactttatttgaaaaaaaaattagttgtacaatggatctgaaaattcctcctaaaactacctccttttcgtatgtcaaagacaaaattaaaaagccggctactctgggtacaccgcctttggggtagccctgctccccaaggaacagtacaataaaaatgaaaaagcctattgacaggaaaagatcagccaaaaagacaacagcttactttactgtggtggataaattaaaactgcaagtgactgatagcgtttaatagaagaagcaattttcacacatctgtaaatatgtaaatatttatgtaaatgtaaatattacttagtaataaattcatagtaaaattatgtaagtattgttagtaataaatattactttgtaataaattctatgtaaatagtatttagtaataaattcatagtaaaaatttctatgattaatacaatacagatactcctttaaaggcattctgaattcggaacagtcttctagtatcattacaatcaccttcttagagggaaatggtttgacattagaaaggggtcaaccccaggaggggagaggatcgcttaagaagtacgcagctgaatatttcaggttcgctgcatgtgttagtctgggctgctataacaaaacctcacaggcgggtggcttgaacagcagagatttctttctcacagttctggaggctgggactctaagatggagactggtgtctggtgagggcccactttctggctcctagacggtgatttctcactgtgtcctcagatggtggaaggggtatacaagctcattaaggtcccttttataaggacactaatcacattcatgagggctctgtccttgtgatctcatcactccccaaaggccccaccccctaacaccagcaccttaagggttaggatttcaacataggaattttgagatggacacattcagaccatagcactgcaaatgagtaaaataataacagtattagtaatactgctaacaaaaaccatgctacagcctttagaaggaacttactccttgggttttgtcaataattttttttttacagttggattccaaatgatggacctcacggtcactggcaagataatgagaaaagtccgggcacagtggctcacttctgtaatcccagcactttgggaggctgaggcgggcagatcacctgaggtcgagaccagcctggccaacatgttaaagccctatctatctctgctaaaaacacaaaattaggtgggtatgagcatggtggcaggtgcctgtgatcccagctacgtgggaggttgaggcaagagaatcacttgaacccaggaggcaaaggttgccgtgagccatgattacgccattgcattccagcctgggtgacaagagtgaaactctgtcttaaaaaagaaagaaagaaagaaagaaaaaaacaaaaagataatgagataacatgtggaaggaggccctggagcgctctcattcaacagggacacccaggcccgcagctcagcctttggagatggcaagtcccaagaatcagaagaaacagatgcttcctgagtcgtcaagtgaggggatttcatctcccagcagcaaaaaggagatcagaattggaaaggaaatacagactacaaggaaccctggcccagagcccccaggctgtgcacacgtgggctccaggcgaaccatttcaggttcagggaagacggctcagcctaacctgggtggggctgacttctgtgcacaacatctacacctggccctctgtgcacaaccagagctccccgctccaccgatgcccagagcacagcgactgtgctgcaagcggggtgacctggctgatgacaccgcggctcacacagaagacaaaggagcaacaaagctgccagaactctagtttcccagccttggcagagaaagcccagaacaaccagggtgctcacatgttccagaggtacaggagaataagtgtgctgcttcttcttactcagataactttatgtcatgaccaatgaagtaacttttatcaaatttttgccaactatatagacttcttaaaaaatcatttgagaagggacctcaaagtgaaatccatttacctgaaagcacacggcacagatttcgtaaggttgtaaagaacgattgcaaaaccagaagcgcttcccctgacaggctctggttaaaccctagccgccaatgctgcccaagggctgctgtccagtttcacccacagctgtgctggtctctgatgttgccatgtcttccctgcggcacggacgctgctgaaactggtgctcccttcagaggggttctgctgacagctgaaaagacagtccggcaggccacgcaggacaccagtgtctacttctcaaaaagcccctcccttaagagccaagtgaaaagtcccatgtccccgtccatcttataaaacgaaaggaaatctgtttttttcacgcacagagcagcgcttatttgtttccctagagaggcagcaccacagctttcccaggggcagtgggaaggggctgtaagtactcaagagaacccgcgtttcacgcgactcctctccaaaaacctgaaaaaactctcaagagaacttgcgtttcaggcaactcctcaccaaaaaccttaaaaccgggcaagtaagtccctgtgttactaattccatgaaaaaaactaatctgtttcaagaaagtcagaattcctcccttaaggactcacatttgcttttcttcagaattatggtaaataactcaatgtttttcttggcttgcttttccttctaaagctgctaagacacgggcagagtccttaggccttggtgctttgctaaaatcagaggctttgtaggctgggtgcggtggctcacgcctgtaatcccagcacctttggaggctgaggcgggcggaccacttgaggtcaggagtttgagaccagcctgaccaacatgattaaaccccgtctctactaaaaatacaaaattagctgggtgtggtggcgcatgcctgtagtcctagctactcaggaggctgaggtgggagaatcacttaaacccaggaggcagaggttgcagtgagacaagattgtgccactgcattccagcctgggcaacaagagtgaaactccatctcaaaaataacatcacatcacatcacatcacatcacatcacatcacatcacatcacatcacatcacatcaggggctttgtgctcctgtcagtcacagccaccttctacgatggtgcttcaccagggccacatgaaggcacagacgttacatttataaaactcagcatctgtctagatgcctaggaaaccccacctctaatgagaaagttggtaaacaaagcagttatttggccccttttttgttaggtttaaggataaaggataaacacatatataaaatcaaaagaatccagtgacctttacttttcaaactttaaaaaaaattttatgtttagagacagagtctcgctctgtcgcccaggctgctgtgctgtggtgcaatcatggctcattgcagcctcaaactcccaggctcagtctcctgagtagctgggaattaccggcattcaccaccatacccagctaattttatttgtagacacacagtcttgctatgctgcccaggctggtcttgaactcctggcctcaagtgatcctcctgcctggtatccagcaacctttaaaaggtaattgtttccccttctataacaagaggttacagtttatattttcaagctctaagatgaaacaaagtttcaaactataaatatttatgagctttgaggaaaccggctttctccacagtcatgttttcatttaaattattttaaaaaatagatgactccatgcccatagtaccaatttcactggttattaaggggcatccaggggagagtctcctcctacctccccttccccagagggaacagaagttcccagtcagtgtagcttgcgtaaggggacatcactgagtgatgccagcacagcgctccttgcaggaagccaccacaatatctgctatacctccagagggagaggctggggacattccgggagagctctcaggtggggaaaaaaaaacaaacaaacatgctggatggtgagcaaaccaatctgtgaaggaaatgaaaatggaaatggaggcaatcgccccatgtgagctgtcagagtgcagctggaggagcaggaaacagcgtattcgttaggagatctgggaatctggggccacgcctaagtctgcccatctgcaaagaccccttgtccagaaggtgtggaccacggagattgtgatgttaatttcactgaactgggccacagggtgcctgatgcaacaccgttcctgggcgtgtctgtgagggtgctcgagatgacattaggattaggacagtgggttcaggaaggtggactgccctccccaagtggctgggcaccttccaatccctcaagaccctgaatagatcagacggcagagggaggaggagttcacccctcatttcctgcctcgccgccggagcttggacatctcatcctctcttgccctgggactggatgtccaccatcggctgcccaggttctcaggccttcggacatgagctgagtttgaatcacgcctcgggcttccctgggtctctagcttgccacacagaacatgggacttctcagctcccagaatcacgtgagtgaaattctccatcataaatctccttttatacatctatgtatcctgttggctgtgcttctttggagaatcctgactgagatcagggagatctgtggccgaggagttgaacggagtgagactcaccctggacccagggtgtgcaatgagtaggtgctcaaaacggcagcactttcggtttccatctggtgtgcttcccgaaccctgcaagtcaacatttaagaattcctataatctgaattaaagacaattagagacatcagaataaagccctgctcaagcttctccaagctcacaaataaaatcaaagacacaaaccaagactttgaggaaatttcttctgcacccatgaagtctttactgggaaggccttctcagtgcggccttactggaccatcctatttaaagccgcaactcccaccaaaaaattccttatttccttttcctgccttttttttttttttttcgtggcatagaatctcagagctggaaggagctctaaaaggctggaccagtcaccgtccagatgtgaactccttgcatataacggccttccacagaagtttatcagcctgtccaacacacatcctagaaagggttccctgacctgccccgcactgctcccaagcacccttcctgtgctcccgacagcaccgggtgtgcactgctcccctccacagcactcactcacacgactgccaggcatccttgctaggcacggcctgggaaacattctccgtttcatttcaaatgcctacaatacagtaggcgctctgcactcggcatggctgacaaggacgtcactgtatccaggtctaatctcgccccttccacccaatccagtcccctgtcaaagccaccaagcgccgccactgtggcaggctccgaggacacaacagagaaccagacagacaaggccttgcccgcatgaggcttccaagctcactggagaaggagcaatacaaaaagcaagtggacaggaacatcggcgaggtgcctgcggtccggcactgtgagtgtgctctcaaggaggaagccagtcagcggacctacagtcaaggaggctgcttaaatgagggctgttggggaaggcggctcaggaggaggcatttacaagaccttaaggaggggccggctgcgcagcaggggcaggaggagctttcctggtggaaggaatctcacgcacgaagaccctgagcttcgcatttttgaaacactaaagaaaacatgagggaggctggagcgtgtaggagagatgactcagcgcaggttggagtgcagggctatattggcggcccaggctccacactgcaggcagccatatgcctctgccaaccaccccagggccaagcactggacaaccagggaccaccctgatagcacagaggctggggaaattactcaaaccagccaatcctaaaccgcggatgctgccttgcccatttcttttcagaaaccacaatcgaggctcttgcccacaagtacccctccgcctcctgacccagcgtggtgctccctggagcctggtgctccccgtgtggccccgtgtgctgtgcctcctgtttctacaaatctgtgagcacaagctccttcctcacaacagtcccgtctgtgtcttagcacacctgatgacgtccaatcccagagacatttcccatcactcctctgctcctctccatctacacaaacactgaatttttcattcatctgaaaataagggagatagtttttgagttcatttaatagccttgctgagactttccatgagaagcaatggttgacagcccctggcaaagctgggcctgcgtggaactgacccagcaactctgcgtctaagtacacatcccggagagaccctggccgccgcgcacggaggcgtggacacggacacacagtgcagcactgttggtcgcagggaaaacggtaaacaacctgaatacgcattcacagggaacggatcagcaattatggtaagtaatgtgacggtggaaagaagtaaaccagatcttcacgcacccccatggacagcacgcacatgtgctgctcaccaaatcctttttttttgagatagtcttgatctcgccgcccaggctggagtgcaatggcacggtcttggctcactgcgaccaccacctccctagttcaagcgattcttctgcctcagcctcccaagtagctgggattacaggtgcctgccactatgcccagctaatttttgtattttttagtagagatgggtttcaccatgttgaccaggctggtctcaaactcctgacctcaggtgatccacctgtcttggcctcccaaagtgctgggattacaggcgtgagccactgctcccagcctagcaaatccattttttaaatgatatattcaaaataatgccatttccataaattcttaaaaacaagtaatatacatattgattatggactcaaaacatgtacagaacacaaattgaataattatccagctcatgccagggtttcctcggtgggaagggcagtagcagcagtgacagtgagaatgatattgaagctaacattcactgaacacctactctgtccaggcacaggtctagcacacattaactcattcaattcttaagagcggccaggagacatccatgattactgtccccatttcacagatgagaaaactcaggctagagaaatgatcaggaatgtgcaatgcactccggtgacttcttaccgcctcctctgctcccatcaagtcagtctgggtctctgctgctcttcactgatgcccctgctctcattcttgcccacttccacctcctacccctggaggaggtctacactccccacttaacaaacaatgacccttttaaaaacacagttgggtcagttcaactctctacttaaactttccaatggcttcccatcatactccactttatttttatttatttatttttgagacagagtctcgctctattgcccaggctgtagcgcaatggcgcgacctcggctcaccgcaacctccacctccagggttcaagcgattctcctgtctcagcctcctgatagctgaaattacaggcacgcgccaccatgcccagctcattttttgtatttttagtagaaacggggtttcaccacattggccaggctggtctcgaactcctgacttcaggtgattcctcccacccctgcctcggcctcccaaagtgctgggattacaggcatgagccaccacacccggcccatactccactttaaatgagaatccttacacagcctgcaagactgtatatcctcccttaccccagccaccccatgtccacctgctctctcgccctcactcactctgctctgcccacaccagcccctcagctctctctgtggagacattatatatttcttcacttactcattatttgtccctaacctgcccattacgcagacaacatggactctgacttttggccactgctgttattcccaatgctgaaaacagcccctggcactcagatgtttgtggaacaaatgaatgaatgcagctgatccaaggtcactcaggattctggtctaagcagtttggttccagtattaggactggggaggagaacggaacatagaagaaacatctaaagttatgacaaatgttgtcatctattaattgtgaataaggaattctttgttaattatcatctcctccttccattcctccttccctccctttagttttatttttaagtctccataagtacactacacatgaattattagttccaaatgtattagaacacctgctttcatagttaggaaactaaacaaaaaaagaagaaaaagtactagcacactgtaagattgctcttaatgtttcaagtgggactgtagttcactataacgtattaaaattaattcaatgaacacggaatgactccctacacagctaacaggcatgtcagggttttgtaggttctggggggagtcatcattaagaacatcaattatttacataatagtgtaattctgccattaaaaaactggccatctgacatagaacaaagtttgtttaccacatcagtactgacatctgggggctggggaattctgttttggagcgcctcacacactgcaggacagtcagcagcatctccaaccatcagatgccggcggcacccatcagtgtcacaaccaaacacgcctgcagacgctgccaaatgtccccctggggagcatagtctctccaacggagaaccactgattagaggctagacaaactacagcttgtaataaagaaaatacaacttataataaagaacaggaagcctggtgcggtggctcatgcctgtaatcccagcactttgggaggccaaggcacacagattgcctgaggtcaggagttcgagaccagcctgggcaacatggtgaaaccccgactctaataaaaatacaaacaatatttgggcatggtggcgtagccctgtagtcccagctcctcaagtggctgaggcatgagaattgcctgagcccaggaggtggaggttgcagtgagccgagatcgcgccactacactccagcgtgggtgacagagaccctaacttgaaaaaaaaaaaaaaaagcaaaggacaaacgaacaagggagggaggcgactcaaagtggcctctcccacaggtttcgcttgccgttttcacttactctctctgaccagcctcacaaccctttcatggtcccctgtaactagaaggctgtaaggcaggccacaagcccgtggcacgggcagaattctaaagatggccgggggtattcatcaattgggaacctaggtgaaaggtctttgcagaggtaattaaggctaccaatcagctgagcttaaaatagggcgattattctggattaccctgcgagcctgatggagtcaccagtccttacaagcagatgtggaaggtggaaaagtctggcaggttccttgtgagccgctcgctgctggttctgagttgcaggggctgcaagcaagactggagggaggcctccaggagccgagggaggtcagaaaagaaaccggacctcagtcctacagctgcaaggacctgaacccttgccacaacctgaatgaacttggatgccgatgcattcccagagcctccaaaaaggaacacagtccggctggaaccttcctgttagtctcatgacactcagggcaaccaactgagccacactgtgcccagacctctgacccaagcaactaggagctaacaaataaatgttttaagtcccgaagcctgtggtaatttgttacagtggcaacagaaaaccaaaacagctgtggaggtgtatgtgactcattactgaaaggtgagtttataagtgagaaacacaataaccaaaagcagtccccttaagaaattccctagtctgcataaaagacaaataatccaaattaaaaaaatgggcaaaggatctgtatagccatatctccaaagaagatacgcaaatggcccataagcacatgaaaagatgctatacctcattcaccatcgaggaaaggcaaaccgaaaacgggatggctggaattcaaaggacagataaacacaagcacggttagaccccaaagacgttatattggtgggaacagaaatgttgcggccaattcagaaacactcgggtagctcgtcaaaatgttaaacataaagcaaccatttgactcagcaattccactcctaggaatacacccaagagaaaacatgttcacaccaaaacccgcacatggatgtttatagcaacatcattcataacacacaaaagatggaaagaacctagatgccactgactgaggcacggataaacaaaacggggcgtagcaaaagggaatgctattcggccgcttagagggatgacgatgccacgctacagcatggatgaactttgaagaaacgatgctaagaagtccgtcgcagaagacaacatactgtatgattccatttacataaaatgttcagaaaaggcaaatcaacagcgtcgagagaaatccacggtgtcgaaagtgggctggtggccgcccggggctggggctggggcaggaggaaaatgtgcagtggctgcagggtttctttctggggtgatgaaaatgttttaaaaattgactgtggtgatggctgcacagctctgtaaatagactgaagtccactgaattgtaggctttaaatgagggcatggtatgatatgtgagttatagctcaataaagcttttttttttttttttttaagctgaggccaggcatggtggctcatgcctgtaatcccagcactttgggaggctgaggtgagaggatcgcttgaaactagcccaggagacatgcaaaacctatcgctacaaaaaaataaaaaataaaattaaaaaagctaaaaaattgaaaaagaaagtcccaagcgctgtaaagcacagagcacggaagtgacacacagtgtggcagctgcttgttgtccagacctgccccaccggccagtcaccagctcctgactcactgaccaccctggcctctgccctgtaatcttccaaagaggaaactccaactgtgtcttttaaaactttttactttagagacaggatctcactctgtcacccaggctggaatgcagtggtgcaatcacagctctctgcagctttcaagctcctggactcaagccatcctcttgcctcagactcccatgtagctgggattacaggcatgcaccaccatggccagctaatttctaaaaatttctgatagagatgggatctcactatgttgctcaggctggtcttgaactgctgacttcaagaaacctcctgccttggactcccaaagtgccaggattacaggcgtgagccaccgcgcccggcctacatccatgttttcatcaacatggacaaaactccacaggaatcactcccatttcacaaaaatgttgtctaggtgaaagatgccaatcaattattctctggttaatgttctgcttattcttggcttaagaatttttgtgatgacgcttagattacagatgttctgcaagacaggctgagaaacagaatcattccaatcactcctgctgtatcctgaggggagactctccgcctgttcaacacagggacacgctgcctcccgtggcaaggtgactgtcttgctgctgactcgggcaaaaagaccatgagaatgaattcaccaaccagggttcccttccctcgtaaatactgtgagaaaatggatgtcagtctccagctgaccgcagagaaatcacggccaggtgttggcacttacagagaagaatgaatacagaactgctttaatcatccactcaggaaactccccaattgtatcaatgactctatataaggaagcgaggcttgcaactccaaacgaactcactgggtggccccaagcaaaacaattcaccccaaacggtgtgccctatggacaagagaaactcctgcagttattctattttctcagctccctgctcctcgttttcctccaccttagcaagacagtgatgaacaatgctaggtaagctctttcccttcctgtggcaagtctagtagcaaagggctagttgccaggaaacatgaggttacaccatattcctgcttagtggaatcctgaccttcatgttactaaaacatgaaaaatactttgtttacaagatcatcaatattaaaatttggctttcaagttccctaagacctttttcctgtatttattacaagaatttatttatgcatccaacaaatactcaaatgcctactatgtgctgccatggtgccaggccctagggacacaggggaatcagaccaggccctcgcatgcccgcccaggctgacattccaggatgtgatgactagaactatgtaaaatgtgatatacacatcaacaagggtgattcagattaccaccaacatttcttaacaaacctagctaaaaaacgttagaatgtgcttagccttcccattctcttttaactttttatctaaacctacaaattctgaagcttctgtgggaagctatgcctcctccgagatgttgttcttcgtacgttttcaaccatacagcggcagcgactggagtggttgttttgcatgtcaggcttcactgggcaatttcttcagaattcagagatctacctactggaactagcatctgtagacagtccagtaactaagagtggtagttctgagttaggtgggcctgagacctggcacactcttaacctccccaatctaagacatatcttatggaagtccccttctcaaaccctgataaagattgaagggccaagcgtggtggctctcgcctgtaatcccagcactttgggaggccaaggtgggagggctgcttgagcccaagagcgtgagatcagcctcaatcaacaaaaagaaaaaggactgcaagcccagggcaggaggactgcttgagcccaggagtttgagaccaggctgggcaacatagtgagtccttgtttctacagaaaaattagccaggcgtggtggtgcgtgcctgtggtcccagctacacaggaggctgaactgagaggatcacttgagtccagaaagtaaaggctgcagcgagctatgatcgccccactgcactccagcctgggcgacagagtaagactccgtttccaaaagaaaagaaagatttaaagacaatgacttggaaaggagttgaaggagataaacactcaaccccctcagtccctaagagagtctgctcagccccctcctagatgtgataaaaaggtgctccctagattcactatcagtcctctgcccattccctggcctcccattactggaattcaacatggtttaggagattaaagacactgagtctttcagggacattacagttaccaaccactctgatggccttgaagaaagtaactttaattctcagtaactatttgtatattatttgtaactaaaaacgtggggtccgaggcatcatctatggcaggctttgttggagggccttttccaggcttcctggtgtagtccagagacggccccataccctgaagaacccttctgtctgcttcatccagcatacacacaaacccaagggaccccgccttccccagctctacagagacaagagggaactatttatataaaaaggctacttatctgactgaaggctgatagcagtaagggcaaaagcgtgttctgacactccaacttcaaccgcagccccaattcaggactttgacggcatatgcaggaggagtgcttggggaaggtaacaggaacagagggcataaggaagaacaaatgagaaccttcaagaattagacaatcattctttggtctttcaagcatgctaataataaccctctgcagatttagaaaaataaaactgttcgggaagaggccagtcgttgcttaaaagaattagaacaattcgttcaataagcacttaggaagtgtctgttacaagctggaatacaggaaaaataaaaatgcaatactcaatgtcaaaggatctttcattctagttggctaggcaagctaaaaaaaaaattaaaaattaaaaaagcatgttgcagacataataaagcacaaactacctactaatatctataaaacccaatgcaaatgagtaaacttcatagaataaagatcatgcagtaaaattacttagagaaagaagcaatgtcttttctaagactctttttcccatgaaaataatgcgcattctagaaaacagagataagggcaataaaaataaatcccctttaattagagagaaacgctcattacatgttagtgtcattaccatatgccaccaccattctttttgctcacattcaaaacatggttcctaaaagatagttgactccttttccagttgaacagatcacacccatgtctgcctgtctcaaaaatggtattttcaacatcaacactttcacaacatttctaggatctgaccgcttcccagcatctccactcctaacacgctggtcccacagatcaggatgacagcctctcactgcccccacgtccacctggtctccctcagtgagggtggccagggcaaccccgtgaatgtccaagtcagatcctgccactcctctgcagaaatcctcagggacaaagagcccctcacacacagagttaaggcccgcgtcttcccagtggcctgcacccgcctctgcccatccaggggtctcctccctcactacacagccatcacactggctcctctgggtctgcggaggcctctgcacttggggtgctctccccatcacctctgcaggcggctccctgccacccctgacatggacacgctctcgccctgctttctcctgcccccagcacttgttgctttctaacatttcataagacgtgcctgtttaccctgtggatcgtctgtttcccacactagaatgtaagctctacatggcaagcatttgtttccaatgatgtatcccgggcacttgatatacagaaggtgctcgataaatatcagctgattcaccgacttattaaaagctgtgtagtgcccatcacacaccacagttcaatcagtcagccccaacaggtggcgattaggtcattccaggattttaacaatgcaaatcaaaccgcaataaaaaaatccctgctgctcaaagcgtagctgagggccggtggcagcacagccatcacctaggagctcacagacctcccaggcctactgaatagaatctgcatttgaacagcatggccaggtgaccacaggcacaggaagtccaagaaccactttccgactaaagacaagggaggaggcccctctccctcaggccccgtgagggtgaggtctgcacctgcgggtggacagacacctggcttgcctcctcctagatctcgctctgggtagtacccaagactccatgaccatctctaaacatcagactgccaccaaaagacaggttacaacaatttacatcctaaatccaggcacccaacaggaaacaagcaggacactcaaattaggaactaatcacaaaggtgtgggggaagcccgagaaacaagacagaaggaatcctggggcgtgggaggggagaagaaatactgaacctcactctctcccctccctccctccgagctcttgccaggacttcccactggccaaccagaagccagaaagcacaacactcgctgctacaatctatacaggtcaccccaagagcagagagctgacagaagcaggagagagggcgggaaggggcggacagaagcttcccagcatgtgcgcccccagcagtgtatgaagacgctttcctcttttccctaaaggggtgtgttttcatttcacataatatgaagacgccatgaagaagatgtaaactagggaaggaggtgctggagagaagggagctatctcagagaggaggagaagtgcgtttgtgccatcatacagctactgtggtcatttctggctgagaaggtatcgagctgatgggaggctgagggccgctatagttttgtaaacaggaaagcagccttatgaaaaatgcctgagaaaacgtgtgctggcgtttgcgtccaggacactgaaagaaggaggatgcaggacagagaagccagggaaacggctgtggtggggccgcagacacaaagcagctgcggcagctgaagagaacaagtctttagagtacgctcattccagcgttcatcccagcattcccaccacccaggggacaaccagcacatagaaagacgctccacaccatatatcattagggcactgctaattaaaatactgagatgccattcctcacctcttagggcggctaaaatccaaaacagacaatgccacatggtagccaggaagtggagcaacaggaactctcattccctgctctgggaatgcaaactccggaagacagttgggcagtttcttacaaaactaaacatactcgggccgggggcggtggctcacacctgtaatcctagcactttgggaggcgcaggcgggcagatcacgaggtcaggagtttgaaaccagccaggccaacatggtgaaactttgtctctactaaaaatacaaaaaattagccaggcttggtggtggatgcctgtaatcccagctacttgggaggctaagacaggaaaatcacttgaacctggaagcagaggttgcagtgagccgagatcacgccactgtactccagcctgggtgacagagtgagactccatctcaaaaaaaaaaaaaaaaaaaccaacaaaagcaaatacttgtaccatataatccagcaattaactgcacttgaaatgagttgaacacttatgtctacacaaaagcctgcacacaggtgtttaccacagctttattcataagtgccaaaacttaggagtcaccaaaatgtccttcagcaggtaaatggataaacaaagtgtggtatatccatacaaaggtatacaactccataatgaaaagaaataaactaacatgccacggaaagacacagaaaccttaaatatgtattgctaagtgaaagaagcccatgtgaaaaggctacatattcctgattccaactacaggacattctggaaaaggaaaaacgatggagacagtaaacgctcagaggctgccaggggttgaggggagacagggaaggagggatgaacaggtagaacaaggaggatttttagggcagtgaaactattttgaatgatgccataacggtggagacatttgtcaaaacccacagaactatgcaacacaacgagtgaaccctaatgcaaactatggacttcagttaataatatattcatattcactcacaactttcccaaccctagcacactaatgcaagatgttactcacaggggaaaactggtgtgggggaggcaggcagtatgtgggaaatctgtattttctgctcagtttttctgtaaacctaaaattaagtgataaagtatattaattttaaaaaagtgaaggaagccagacacaaaaggtcacatattatatgattccatttatatgaaatattcagaataggtaaattcatggagacagaaaacagattagtggttgccaggggccgggagaaggagggaatggggagtcactactaacgtgtccagatctccttttggagtgattggaacgttttggaatttgatagaggtggtgggtgaacaacacagtgaatgtactaaatgctactgaatgtacacttccagatgattaattgtatggtatgtgaattttacctcgattattttaaaaaacagagtgaaaacagaaaggttgtattaacgaaacttcagctggtcaggtgaagtctgtgatgtcgcgtgagaattcaagcactgtggcccggactgaaggcacctaaactgagggaataaccaccaaactgactggaagggaaccacagtggcttctgcataaccacgctgaggacagtggggctgggctggtccgtgagcagtgcagaggacagaacaggactcctgactgcagtgacaccaggacatgacttagaatagggcagatggcaggaccaatgtcagaaccactcagagaaaggagttataatgaaggaaagaatcacctaattataaaaacataccaaagaaaatattcatgtatatctatcatgaggtattgctaattaactacaaaaacatcgcgcaaatttttttagaagactcaattcaagattgaagtcttttaacctacttcaaaaacacctacatttgaaacattctccctacccccgatactttatttaaaattttttttaattaatgaaagactagaaaaagggcgtcttactttaccagaagagttctaatttgctccagataacaggaaagaactcaggcaagttggtggctcttttcctgaagttaccaagaattaagaaacaagacaagtttccaattaaaaaagaaaatgccgaagatgttgtggtctccttggcagatatttacacattctaaaaatattcaagattacaaaaattgtaaagcaagattcaaaccagaaattaaaacacctacaattcaaaatgaaaacttcctgaaaactgcagaggaatacagggagaaaaggctttaaataatcactactggacagctaaattatattcctaaggatttgtactataaaataactatcaccaatgcagtttctaaactaatgtttgctgtagacaatagttatttttattttttcagagacagggtctcactctgtcaacagcccgggctggagtgaagtggcacgatcctagcttactgtaatcttgaactgctgtgctcaagcgatcctcctgcctcggcctcccaaactgctgggattacaggcatgagcctccacatccagccggtattgttatatggtaccagggacgcagctggggaaagatcaaagtgttgtctaccaagctggctgcaggtggctgcccccaagtcctctagctcctgttaccttaggacgctacgttaaaacaccaggaaagggaaaacaaaactattcctgctctagtgacttcagtttagcaggtggtcaaagaaataaatttccctctactccaatggagtcttctttagtggatatacccatatgaaaatggcctgcttggccaggcacggtggctcacgcctgtaatcccagcattttgggaggccaaggtgggtgggttgcttgagctcaggagtttgagaccagcctgggcaacatggcaaaatctacaaaaatcttaatttttctctacaaaaattttttaaaagtgagccaggtgtggtggtgtctgcctgcagtcccagctacttgggaggctgaggtgagaggatggcttgggcccaggaggtggaggctgcagcgagccaagatcacatcactgcactccagcctcggcgacagagccagaccctgtctcaggaaaaaaaaaaaaagaaaagaaaaaagaaaatggtctgctcattgtatgaagtacaaagggctcacctccatgagagcagagaccagctattcgtacaaaaggccctttgctgctcttggccctcacaaacaggtccctgccccaggcagtttaaaatcaggcacacaggaggagaaagcctagaattgggaaatcctccacccatatttccctctgtcggagagataagaaaaactaaggcttctttaaacactgaggtttaggttcatgttttttgtgcaaatgcctgaaggagtccagtgtctctctgactcccaactctacagccatggggacgctgacagtgggtaggattcagagacatccccttgcatcgttgttcattactattcagttccttcctgtctccgatgcacctatgagatctatgacgatgctgagttttcaatctattacttctgccatttccctgtgcatctcatgttaatgctttctcataccctggagctcttgttttatatcatctatatacttattattcttatacaatatagagcactcttggacaggctacttctctttcatagtttctcttcttaccctgtttttcatctgacttttgtgtgctagttttcctctcgccctcttttctttagggacggtgtttcggagctgccatgttgtccctttccagcatccctgtggtagccctccaccagcctgttctcagacgtgctcgaggccagtttttcctgattctgtttctacctggtttgtcttcttggaccagagctagagtttgacagacagacgctgctttcaatccctgtctgaggaaagggagatgatgagagctgggaacttgtctggggctagtggattttctcctgctagctagtaagtgtcccaacctccagtggactcctgcctcgagctgtggtcagcacagagctctgggtgcctccacacttcctggctccaccaaggaccctttccttttgagtgttctccccgaacttttccccggcttctattcccgactctgggtctgtttctttctagatgggaaggtgtcagaatgtttagggttgcaatggctctttcttgcctcaatactaccttaagggactggggctggggtcaggaaatgcactacacaccctagaatcttctttttgccttgggtgctgtgttcatgctcatacgagtctcaatatttcttcctctgctcccagtctagaatccatttggaaatcaaaacaggagtcaggtggatggagatgaaaatactggccttctgactaaagagtctggttttgggtttgtagccaagtaggctcctgaccactgccatagtgggacaaacgcaggggaggtggccctacaactctggcaggaggaaggcatgtcccctgtggggagggcggctcccaaagagagaacctggagggaatctacagggcctgagccccacctgcttactgccttccccaaaatccaccagtcaagcaagtcactccttccccgagcaaagggggataagggatggcaggagaggcaagagaatcacagtagctgagatctctctgcaaggaaacatgaggctaggaaagtgagaatcccacccatcagagtaaagcccaacctgaccttacaggtttactcggaggatcaaagacataacagataaggtgcttcaaacacacaagctccctgccaagtgggctatggcggtgtgcacctgtgtcctagctacccaggaggctgaggtcggaagatcacttgagcccaggaggtcgaagctgcagtgagctgtgattgcaccactgcacatcagcctaggtgacagagcaagaccctgtctcaaaaaaattaatgaaaaaaaaacaaaaaacaaaagctcccaatgcacagagaaggtatcaaggtatcattccttccaggccatcttctcatctcctcagcttctgcagtacctagcacataaacacacacttaataggcatttgttgacttgctgtcccaagatgattacttttcatgaggcatctgctttaactagtgcgttccagcagtcctggtatgtttaaaaacagtctcattgtgctacggtcataccagataagtactgataagaaagtaaatgaccggttttctatttctcaattctgaccagctcatctcccagggagttttgcctcctggtccacatcactccatacttttaacagagttttcgatccatatctatctaatcaagtcatcagaaccttagggaaaaacagttcctctccccaccctaaaactaaaattatggaacttcactttctttttttttttttttttgagatggagtctcactctgtcgcccaggctggagtgcagtggcgcgatctctgctcactgcaaactacacctcccgggttcacgccattctcctgcctcagcctcccgagtagctgggactacaggcgcctgccaccacgcccggttatttttttgtatttttagtagagacggggtttcaccgtgttagccaggatggtctcgatctcctgacctcgtgatccgcccgcctcagcctcccaaagtgctgggattacaggcatgaaccaccgcgccccgcctggaacttcattttcttaaaaaaaacacaagtggtcacaaaaatataaatagttattagtcacctcatgtgcgccaaaaattgtagatataaaactgagcatgagtggaaaacacacattaaaagtgttcttagtattatacaagtaaacatctgaaccagctattccctcttacctgtaatggaaaccggaaggcaggtgagactttaagtaatgactcccttatcacaagggttttgcctggaatactgtgtatcttgtctacaaagatgtgcaaaattttaccttaaaatgaatgtaatttgcatcccgtggagttgtcagtgactgccagtatctcaccttgactgagcatcaaactgttttgtcacaaatttctccgcagcccaaatccctgattttggccccaggacatcgttagactagtccaggtggatgtgttcatccatcttatggacagtcgaaaggcctcttccactaggcaaggcctcccctctcctccaagtgactttcccagtgatgttccggctcatgccctgtcctcccgttgtgtttcctgtccccagagaagtgaactaggaatcagctccacgaggccaggactgtgtctcctccactcactaccatacacacagcagagcacaaagcctagctctgaacgacagagcaggtcctcccgtggaccccgcatctagcctggcctttcccagttgagaccaggcaacctccactgactgccccaaacaggcactcgagggctgcgaggagtccacgccatgcaccatcactggaacgttccaccacggtgacgagagaattagcacagattcttcgggtctcagtgttcctcgggcttagtttctgttcggcttggcttaagtagctattgattacccatgcctggcacacttccaccagcaaatacccactacagctggttctctgctgctgtggtctgatttaacagggccatgtgacaaagttggtgctgtggacttcagactagacagtaaaatagatgctgacgttcacagagaggtgccgtctacttggtctctacttaagaaagtgggggtcagggatgttttcttccccttgccgtccagagcggctggatgtgctgccctccagcacctttctagctgcttgcaagagctcccaccctctgcttctctgtcctctggatgccgcacttccaaagcagacgttccaaatgcatttggtcaacagaatcaaccagaagcatgagcttctctaacggctaacacaggatacaagtcatgttttccattctgcaaaacctggacacacctgagcatttatcctcacagagagaaagactaacccatcacacggtcagcaacaaatattcacattcggcttttaggattaaaaggcaatccggtggtcctgagcagctgctctgtccagcccacttgaagcctccatttcttttaagtacaaacaaaccataatagttacggcatgaaatgagccggcctgtcatcatgggatggcactgcccttcaggtgatgcaagttaagccctaggtccattacacaacatcagcttctttggtttgaacatcaccctataattacatctctagataaggccgaagtttaaatcttcagttccatttaaaaccggtacgatccatgaacccactctcaactgagtaagaacagaaaataattacgagctgtcaacggaacactatctcacatcaagcacagctggcttccaaatctcacatgacagatgactgaaggtcaaaccctgctccccctaattatttcgttaagataatcaacatgtaaactcgaaagccaggggacaagaccaatcactcatgtgttctgaatccccaaaaatggccagaggagtctctctggacttagttagctgacggaaaaagatgtttttgcatttgttttgtttggttttttggtattacgaaaggaccaaccccgtatgtcaaagcataaggtaaacctgttaaatgcaatttgccaacaaggccataaaaaccaaactgtgcttccagaccccagaagcagatgtatgcttctgccgccacgcaaacccgccgcagcatcaagcctaaagaggcacttctgaactcccaagacagagactcttaaaggccagaacagcagaggaggctgcttcaaagttccgtacgtcctggcaaaaagtacatgtgatacagcaaacaattcttcaaaaaaaaaatttaatttccaaaatttttacataatctttgatattccacaacaaaagctgttaacctgcagtgcatgggccactagtaggcccactcttgggattccggatgtccaaacactcccctgaaaccctacacagatacatgaattttctagggagaagacccacagctttcagctagagtgctgcgactgcagtccaaagaaagccaccacattacaaccactcctttggactagaaagttctgattctttagtatctctatgtattcgaattttctgtcttagctgataaatgtagaggcattaagatggttctcatttgtgtattcttctccacttgctgaaatcctacaaaaccttcaaaggccagctcaaatcacaattcaataaggcttttttagatacctcagccagaattaatcttcccactggcctcctgcaacacctctccagtggcatttaccatggtatccattcacgctgtatgttaaagttacttgtgcaactgtctccccagcttgagagtgcgagtggagagtaggggctctgcaatatgcactgaatatcccttctgcatcagcacctagcacaatgccgtggagattttgttgaacttgatctttttgtttcagtggcaacaagagaccacccactctaatcatctaattcttcaaaaagtttctaaaatcagccaaacagtcacgcactgcataatgatgttttggtaaaagatgaaccacatatacgatggtggtcccataaggttataacaccagatttttacagcacgttttctatgtttagatacataaatgcttgccattgtgctacaatggcccacagtattcagtatagtaacatgcggtacaggtttgcagtctgggagcaataggcctaggtatacggtcagctatattatctaggtttgtgtaggtccactctaggatgtttgcgtaagaacctcacctaacgatgcatttcctggacgggatcccagtcgttaagcaatgcgtgactatgcatcgcgatgcatgactatacattgcgatgcgtgactatacatctgcatataagacaagtctaccttggggtggctaaaggctacactaatgcaatcatgtggatggttaggacttctagtctatataacaaggaaccttcagacagctaacattttatccacttctaactggatgtgaaatttagtaatgaaaacgctcttgggatttaacgcatcacacataagtcagggaatggaagcactgtgagataaatctaagctggcctgatgtcttccaacagcctgaggcacaccccaccaccagaggcattattacacaacttcgggaacaccaaatacacaaactttaaggacagcccagtcaggaagtgacgagatatcatctgtagaattagaaaaataaaaagaataaactaggctgttccccacacccccattgatgttggcccacgggggttgccggtccctttaactggcatgtaccaagtccttccaggtgacatttcctccctgtgtcccagcttttagggatcattggccatgggtccaaggggagggaatgtggagacagggttgtatttgccagggaattctgggccgacagggagcaagagcgcgcttgggggcaaagtcccattgtctcatgctgttctccagtcccgagatggtggccaccatgaagaagacggctgcagaagatgtcaatgttactttcgaagagcaacaaaagataaacaaatttgcatggaatacaagtagaatcacagagctgaaggaagaaatagaagtaaaacagaaacaactccaaaacgtagaagatgctcgtgacggtaccatgcttgcagatgctgactgcttaatgatgccttatcaaatcggtgatgtcttcattagccattctcaagaagaaacacaggaaatgttagaagcagcaaataaaaatttgcaagaagcaactgacgccttagaatccaaagtcgaagcaattcagtgggtgtgagcagatttgaaagttcagttgtatgcaaaatttgggagcagcataaaccttgaagctgatgaaagttaaacattttataatacttaaaaaaatttgtttaataaacttgattattgtttaagaaaaaaagaataaactagaaagtcttactggcaatctttacaaaaaaatcaaagcaactagtagattcaaataatgaactgcagaggatagagtgaggtaatgaagtcctcgcactatctaacagaaatcctatgtgcaaattcaggcacaactgtgatcaagatggaaaagccccagacactgagtaaaaagaccaggatgatggagacttccacaaagtaacagctctactcctcccaggtctgcccccttacagctaaaaagaaagttctgaatgtaacacaaccagcaagtgcagaaagcaggtggaaagaaggcggcaggctacccagcgacctcaggacttgagggatgacaaggcagtgagttctctgggtgtccttactgcctcctacttacccaggatgggcgctgcagaagcctccaagctggaacagccaaaaggtacagagaaaaagaactccaagaagagcctgttcttggccaaaggacccagaaaaggatgctcttacaacagcagacctttttggcaatgcccgtcctattccaaataacaagagaaggccaggtgcggtggcccacacctgtaatcccagcactttgggaggccgaggcgggtggatcacctgaggtcaggagttcgagaccagcctggccaacatggtgaagtcccatttctactaaaaatacaaaaattagctgggcatggtggtgcgtgcctgtagtcccagctacttgggaggctgaggcaggagaatcgcttgaacctgggtggcggaggttgcagtgagccaggattgcgccactgcactccagcccgggcaacaagagcgaaactccatctcaacaacaacaaaaaacaaatacaagagaaaacatcagcagagaaaccacatataccacccactgaggtttcagtggaattgagggggaaattgatcttctaccctcaaggaaccaggtgacatgctccaagtggcatgtcaaatagtgctggcagggccaagcagggatctcacctcccattctctgcctggaagaagcaggaggtgctccaattccctcaccagggtggtgtcagcagggcccagtggggaagtgcacccccaccacgaggcagaaagaggggatgggagggtgggaggggggaaggctggattagctgtcgctttgctaccccctcccattccctagaatcagcaacgcccagaggggagctgatgttccaaccccactcaacaaggccacagggtctcagagacccggaggtcattaacaaaagtgctaacagccgtatgtcagagtcccagaaggagatgagagagagggactgaaatagtcattcaagaaataatggctgaaaacttcccacatttggcaagagacataaatgtacagattcaagaagccaagcaaaccccaaatataataaatgggatgaagcctgtgccaagacaaatcataatgaaacttctgaaaactaaacataaaactcttcaaagcagccagagaggagcaatgcatgaactcggagaggagaccaactcaaacgacagtagatttctcttctgaaacaatgtgaaggtatccttcaggaatgaagaggaaatacaggcattcttggacaaaggaaagctaagagaatctgttgcaagcaaactgatcgttaaagaatggctaaaggaagttctctaaacagaaaggaaatgacaacagaagaaggcttagagcctcagaaagaagaccatcagaataggtaataaaaaaaaaagggacaattttattcagtcaaaaggggggaaaagataatataatctcctactcctaatgagtttttaaaatcacagttgatgactgaagtaaaccacctgatgtggcattcaaagtctgttaagtgctaagacatttatagtgaagtggggtgggtaaatgggcccaagcagaagtaaagtttctacacttaaagctgtaaaacatcagggccaggagactgggatcagttacacatgtatactgcaaacctaaggcaactaccaagaaaataatacaaagcattatacttaaaaaaaaaaatcaatcagccagggaggacagttcatgcctgtaatctcggcactttggccaggagactgggataagttacatatgtatactgtaaacctaggggaactaccaagaaaataatacaaagcattatacttaaaaaaaaaaaaaaatcagccagggaggatcgctcatgcctataatctcggcactttggctgaggcaggaggatggctttgaggctagcaattcaagagcaccctaagtaacatagtggaaccctatctacaaaaaataaatatagattaaaaattagctgggtgtggtggtgcacatctgtagtcccggctactagggaggctgaggtgggaggatggtttgggtccaggaggtcaagactacagtgagccatgatcgtgccactgcgcttcagcctaggcaatagcaaaagaccttgtctctaagatagtaacagtcataataatgactttaccctaaatgtaaagagtggattaaaaaatatgatgcaacaatatgctgtctatatgaaactcacttcaaaacaagggtattaaaagaatggagaaatatatattatgaaagcattaataaaaacataagtggctatattaaaatatctgataatggagacttcaaagaaaattactggagaaaaaagaaggacattacataataaaaaaggttaatctatcaagatataataatcctaaacatttatgcaccacacaacagaacctcaaaatacaggaaacaaaaactgatagagctaaagaagaaatagacaaatccacaattatagttgaggactcttaactgacagaactactgaacaatcagcaagcatatagaactcaacaccactatcaatcaagatctgacacatgtagaacattccgccaaacgagcatacgcgtttatcatgtacttacgggatgttcaccaacaaaagaccacagaacatctgccaaatagaccgtatcctaggccagaaaacaaaccaatacatttaaaagaagtgaaaccatacacagtatactctctgtccatagtggagtcgaaccagaaatcaacaaaagagagacaacaggaaaatcttttctttttttttgaggcaggatcttactctgtcgcccaggataaagtgcagtggcacgatgttggctcactgcaacctttgcctcccaggttcaagtgatcctcccacccgcctcccaggttcaagtgtgcaccaccacacccggctaatttgtttgtttttgaaatggagtcttgctctgtcgcccaggctggagtacagtggcgtgctctctgtgcactgcaacctatgcctcctaggttcaagtgattctcctgcctcagcctactgagtagctgggattacaggcacctgctactgcacccagccaatttttgtattttttgtagagatggggtttcaccatattgcccaggttggtcttgaactcctgggttcaagcaatctgcctgtcttggcctcccaaagtgctgggattacaggcatgagccattgcacctggccatgacatgtatgaaatgacaaaattatcgaattaaagaacagaggcggggcacggcgtctcacatctggcactttgggaggccgaggcgggtggatcacgaggtcaggagttggggatcagcctggccaacatggtgaaaccccgtctctactaaatacacaaaaattagctggacgtggtggtgggcgcctgtaatcccagctacctgggaggctgggacaggagaatcgcttgaaccccggggcggaggttgcagtgagctgagattgtgccactgcactccagcctgggcgacagagcaagactgtctcaaaacaacaacagaatagattattcactgccagggtctgggacaggaaggggagagagtggctacaaaagagcaacatgaagggtccttctctgatggaaaggctctgtatcgtgactgtatcgacgtcaatatcctggttgtaagattgtgctatctagttctacagaacataatcactgagggaaagctggcagagggtatgtgggatctctactatttcttacaactgcataggactccagaattatctcaaaatcaaaagtttaatttttaaaaaaggcatgtttagttcctagctctgccatctgctaattaggtagctgactttgaacagattttaatgtctctatcctcaatttcctcattcactaaatgaggtaataccatctgaagcattatgaaaattcaacaccatatttgaaaggatcaggcacgatgtgtacagcacacagtccgtgctctagaaggagcctgtcaacactaaccctctatatagccacaagtattattctaaatggtatcattcaaatgtccagtactaaaggcactgcagagcaatttatttaaagtcccttccctggccaagtttagtatttcacacatgtaatcccagcactttgggaggctgaggcaggtggttcgcttgagttcaagagctcaagaccagcctgggcaacatagtgagaccccatctctacaaaaatgagctgggtgtggtggtacacacctacagtcccagctacttgggaggctgaggtgggaggattgcttgagcccacgaggcgacgcaaggccacagtgagccataatcctgccactgcactccagcctgggtgacagaatgagactctgtctcaaaaaataaaaataaaaaaataaaatagtctcttctcaaagtgatctgttcgaataaaaatgcgggggtgggggctgaagaggaggaaacgatttttggttttaaattgaaagatgaatttctaacttgttattgaaatggtcacgacacatgaagtgagtttaatatggaactataattagtaaaaaacaaagctggaaagaagaactaggataccagttaacacattttgtttctgctgataagaaagtcagtggaagttagtgtttctatgcatcaggaggttgagttttctttttttctttttcttttttttgagacggagtctcgctgagttgcccaggctaaagtgcagtggtgcgatctcggctcactgcaagctccgcctcccgggttcaccccattctcctgccaggaggttgagttttctaacacgcacttcatacagggatttagatttcagattctatgtttccaaatactttctccatctactgagttggaagaaactagagacagtcaaactgctatacttttatgcctgcctggttctgaggtctgggcaagcagcaacaataaaatcaggatctttaacagagaagttacagggcaggccctgagacagccaaatgcacttgaacacagacgctcccagtgagctaagctgggcacctagtcttcaaagttcacgaagtatctgaccagagctctgacgcaccgagaggcttggaaagaggtaaaatgaaaaagggtgttttatcaaattattttcttcccttcacaatcctaaaggagctctattaaaatgaaacatttccatgagaagtatgtcaagtgcgaatactggcctggaagtctggaggccaggattccagcacagagaccccaggaaggagtcacttcatctctagggctgaggcaggagtccttatgggtaagtgatacaaatgtacccgataggtttctacggggctttgctaaatttaaaatctcccaggcaccataaaacctagtctccaggcaggttttctggcatggcaaacttctctccgactctgctttgagatgattgtcctcgcctctaacttggtttccccaaaatgggctggggaaaaagtggtgaggggacaaggaaagggtagagaggtagggagggagggagaaaggaagggaggaaggaagaaaagaaaaaaggaaggaaggtagaaagaaaggaagaaaaggaaggcgggaaggaaaggaaggaaaggaaggaagggaagggaggaagaaaagaaaggaaggaaagaaaagaaggaaaggaaggaaggaaaaagggagggaggacaaaggacgctatctaggtgtaagcaaggctgcactgttccctcatcatcagtttcctccagatcttccttgaggccctttaacacaggctcacggtactgagagactggaaccccgactttatcaactctatggttcttttattttttttcactgccactcaggctggagtgcagtggcccaaacatggctcactgcagcctcaacctcccaggctcaaccaattctcctacctcagccgctcaagcaactgggactacaggtgcattccaccatgcccaactaatgtgttcatttttgtggcactgaggtcttgctgtgttgcccaggttggtctcaaacttctggcctcaagtgatcctcctgcctcagcttcccaaagtgcagggattacaggcacgagccatcacacctggccgacttctacagcttctttcacaaatatggcgaagagaaaaaaggaagcaagagacaggagaatctggagattcattgcaatgcatgtcgagtcacacaaaacaattatgccacaatggaggaattctgaacactggatatctggtgataatgagctattactaatgtttaggtttgctaatggtactgcggttgtgtttttacatggaggcctcatcttttagccactcatatacatcctaaaacgtttcctaatccaactacacaaagttggatttgcttggagaccatggggagggcacaggtgaataggattggcacagaattgatgactgctttagttgggctgtaggtactttacagtcaatctactattttctctacttttgtatacatttgaagttttcgtattagaaagtgtggctcacacctgtaatctcagcactttgggaggcccaggtgggaggatggcttgagaccagcctgggcaagagagtgagagcctttctaaaaaaacagaaaagtaaaaagagactcatggctggttcccgtccagtctccactgctcttcttctaagctcagccggagggcacggccggttgggctcctatcccacaaatcttccagtgggaaatggacagataccattctgctagggcacatccaggagggggctaagtgccaagcccccactccccatccccagaagctggcccgagttcccactcccacggtccccaggcaccctagagagggcagaggcagaccgggcgccatgactcatgcctataatcccagcacttgagggagaccaaggcaggaggatcacttgaggccaggagactgagaccagcctgggcaacacagcaagaccccatctctacaaaaaaaaacttaaaaattagctgggctggtggtgcgcgcctgtaatcccactacttcgggaggctaaggagggagtagggcttgagcctgggaggtcgaggctgcagtgagctgtgagggcgccactgcactcaagcctgggaaacacagcgagaccccatctcaaaaagggcgagacggggtggggcagagacgacgccagcaggcctcggggaatgggtcgggggggagtggggtgcaggcggggctggatccagcatcctcgccccaggggtccccgcccgcggcggcggaccacggaggggcccggggcgggggttagcgccccggcccacctgggtgcaggtgctgggcggggggcgcgcgtcaccttgaggatgttgtcgaagatggtgtcgcggaactccagcagcgccttctggtcgaactcgcggccgtggatgatgcgcatctgcttgaggaacgtggacttgccgctctcgcccgcgcccagcagcaggatcttcaccaggcgccggaccgcgcgccgctcgcgggccagcagcgcgtcgatgtcgcggctacgcctccgggcctcgcgctccgcgtcgcgcgcgccgctgcccgccctgcgctcgcgggccccgccggcctcggccggcagcaggcagcggctgagggtccgcaccaccccggacatggcccctcaggccgcggccgcgccccgccggcgcccgggggccatggacgctcccgccggcgagggcgagcccgggccgaggcaccgccccacgccccgccgctcgcctcaggccgcgtccgccgccgccgctgcagtcgctccgaggcccgcactcgtcgcccggccgccactcgggcccggcggaggggcgggcggcgccgcgtgaggcccggcggattgggccggctgccgtccatctggccgtgagagcccttcgattggctcatctcgccaagggaggcgggcatcccttccggcctcggggcggggtcgacgccgaaagaggcgggatctttgaggtgaaggcgcttctcattggacgcccaggctgaggttctttctttcagaatgaaagggaggcggggtcgcccgggaggcggagcgatcgtccgccatggccaattataattgctctgagtggacatcagacgtgcccaacgggctttggattgggtgttcgggggacggggcgtgacgagaagtgccaggtgtacagaaagattctcccttggttcccagattgggtccgcctgtgagaccaggacctcgcggagtagcccaaaggctgggaaatgctgataagaggttcagctgctcgtcgtattccctccgatgatcttgtttctacactattttccttccagaaacactggagggggatgggccataaatttcaaacacatgcaccctttgagagtggcatgggcttctaggaggctttgcgaaaagctgactaatcactaaaatcaccagaagctcccccaaaagtcttatgtctcacagtgattgagagagtggggtctggagttgctgggcctgagttggaatctccagtcgaccagttactaggtgtactagttgcataactttttttagcagctttccccaccccccccaacaaacccttttggatgttcttagcttccgtttcctcatctgtaaaacgggggtgtcattgacgacattggttatggcttgacattgctcaaatcgtcatgaagatataaactgagaacatgaacttaccaaacacttagcacgtgagctagcccaaaatcagctcttgatagagatcagctgattacagattcttgactctcccagatctactgaatcagaacctcctagaaggagctcaggtatcccttaagattaaaggcgtgagccgccgcgcctggcccagtgtgtagtcttttatctctcgccaccccccaccttttaccctgagtccccaaagtccaatctctgtgcggtgtctgttaactctgctgattatttcttttgcagtgccgaagctttttagtttaattaagtcccatctatttatctttgtttttgttgcatttgcttttgggttcttggtcacaaagtctttgcctaagccaacgtctagaaggatgtttccgatgttatcttctagaatgtttatggtttcaggttgtagatttaagtctttgatctatcctgagttgatttttgtataacgtgagagacgaggatccagttttattcttctacatgtggcttgccaattatctcagcaccatttgctgaataggctgtcctttccccactttgttttcatttgctttgttgaagatcagttggctgtaagtatttgg

SEQ ID NO: 231 - DNA, 169105 bp, Homo sapiens
  source 1..169105: mol_type = genomic DNA
tgtgattcaaattaaaatatttaaatcacatacccacatcttgacatgggcagctatttgtaaaatgaggcaaacccacactgggaaataccaaattaaaaaaaaatcagggaaaaaatattttcttctgggtggccctaaactgctttctttttccccattgcaaatgtatttttatgctgggttacatttccaaaacaggagtgttttttttctatcgttgaaatgaaacaaacaagtttgctttcagagctacagaaatgcccaactgttaggaaaaaaaaaacaaaaaaccgttttccactggccgcttgcctctcttatccccatgcaaccttgcctattggcccctttccctaggagagcccctggggctgtctgatggaactgattgtaaaactattttgtgcagtaaaaaagtcgtttcttcaaaatctgagaccacccagaacatgcccaatctttggcaaatatcgactggtttcctcagtatttgactagctgtacaccgagtaactgtcccgggtttctgggtctttatctgagaagaaatgagggggaaatgtttcagaagatgaaaaaaggaagaaaacctctcatccaaaatctgttcaaaattcattttgtgcgtttcgaagggggaggacaggagaatttagtgcaaagacggcctccaccaaacgaaaccgtccaacatttgcaaaagcttttaaaataaactgctcagggatcaggggtttgctggaaactcccggtcgcttgaagccctgtccctccactccgggcaccctggcctccccagggtgggcacccctcctgcacggagagcggcggctgggatctcggagcagggtcggctatggccctggaggcagcggctcacagagaaaaagctctggcttttctccgcccgctgcgttcctcttcttacagcctcgggtgtcacatattaggtgctcaataaatgtggacataggaaacgaaaagtccgaatctgtccttacgcccccaaggcgaattctggggcgcgcgggtttattccgacccactaccacatcgcgtttcctgaggtaacccggcctcggctctgcggccccagcggctggagagccacggagaaggcgggctacgggcgacaagatggagagccggcccgagagggacagaggccgcgctggcagcgagctggggggcccacctgaccgtcctgcgggcagcccggccccgcgctcccattgacaaggaggtccgcgccgccggcgcgtggggcgggggcggaggcggggtggggcgccccggcgcgcgcccggccccactccccgcccccgccagtcccgcaagcacccaccccgggggagccgcgggccgggagggcgctggggggaggggcaggccgctccgcgagcgcgtgtgcgcgccgccgccggctgacgcgaactccggcgcgcgcctcccccgccccgcgccctccccgtcccgggggcccggcgcgcggccctgctgacgtcagctggcggcccgcggagccgggtgcgcagagccgctggcgcactcgcgcgctgcgctggcctcctccccgccccgggcccaggcgcgcgcgcgcttgttcgctctcccattttttttttcccctccctccctgcctctctctctctccctctccctcgagctcccggctggctgcggctccctggcgctctccctctctctccggtaggctcaccgagcgatgcgagctctgggagacagcgacgccgcctcccgctagagacctgcccctcggcccggccccctgcccaaccctgcccagcgcgcgggggtcggcgaaggcgccgcggacgcaccgacggctgaagagcggcgatgcacatgcactagcagcaccccctaactcactccctccacatcccgcgccgccgccgccgcctcctccacctcctcctccgccgccgccgcctcctcctcctccggcagccgcggcagcaggacccaccctgccccccaccccaccctctgtcggctccggctgcggctccagcctcgactattattttatttattttgggtcgtgcacaagcctcagtgcctgcagtccgcgcctcctcggcccgcgggcgcctcctcccttggctccggagccccagaccccggccaccctcgattcgacaaccccagacccctgccagctgccgcgagtctccgctgctggaatcttgttagcggctgtctttttggagggttctggtttcccgacatttttgtttccagcccaggagaggatatcgtgattttccccccttgagcccaggctctgctctctgggggggtggggggcgctccaagccggggagccgtgccagccgagtcgtgcgggctgtggcagggaaggggccaccatgggatgtactctgagcgcagaggagagagccgccctcgagcggagcaaggcgattgagaaaaacctcaaagaggatggcatcagcgccgccaaagacgtgaaattactcctgctcggtaaggaccgccgctgctacccccatcccccgaccccggccactccgcaccccctgccaccagctcccccaccccactcgcgcccgggagacctggtccccaagttggcaccaccatgtgcccaggatcgcccaccccctcgcatgccttagtccccccctccccctgttcccttaagctgacactcaccagtttttccccactgtctgtgtcccaacaggggctggagaatcaggaaaaagcaccattgtgaagcagatgaagtaagtccctgtggcattgggattcgtacttttattaagaataatttttaaatcgtttttattacattgcttactccacattgctctccaggcctgttttttaattcgtgcacacacacacacacacacacacacccctatatttgactcccctcccccactccctacgttggttctgggtcctccaccctaactcctgggtgggtgttttttgggagggggaaggggagcgcctgtagttgtatgaatgacagtgtccgccatattgatcagaacatcacactattggcatgattatgatcattactcttgcttgtggaatattttctgtgtctcactgcctccatttctgtctgtgtctctgtttcattctgtctctatttctttctcctcttccctccatacctccctatcccccaaggtccgtaatcccacttccccctgctcttttcctggggcagtgattttgaacttggctaacatggaggggacccagccctagactggggtggaggatcaagtgtctgctgttcatgcgtttggtgctgaattggaggctgtggtttctacatcccctcgcaccccctcccccgcaaaaaaagagggccagggttaggggaggggtcgtgtgctaggggaaggagtgggtttccaaacgtaggtgacgggcacagttttatccaaggtagaggtggaagggggagggaagctgcctgtgaggctgaatgtccgccccttgctgcccccagctcctctcctcccccaccctcccagcattgctctcctgacacccgcagttttcgttcgctccgtggcctttatcagtgtatttatttacactctgcataggccgtgttccatgtaatctacccacaatgcggatttcaggccccacttgccgccgcccccttctgccttagctatcagtttcccctcctaattaactgggggtggatttgagtgatggttgaaaattaaaacaaaatgggatattccttcccttccacactttctcaataaggagcctcgcccctcctttccacttgcaggctcgcttcttgccctatccactcggcagttcctggtgatcccacaggcaggtttgcttggggagggggtggccggcagcgaaggggtgtgcgccctccgggcctcctgtttcggttggcctgtcagttcgagacggaggagttcgtttagaccgtttagcgaagattccacgtcgctttgctgtgacaccttcgtgcacacacagctcctaattaggggttgctgtgcagtaaacaaaaatgattatttttcaacttgacacaatagccgaaataattgcatcgcgtagggaaacaatggaaaataaaaacccctttcgtgggaaggtgggagtgggagacgaagcatgcttgcggtttcagaaccaagatgcaaaaaatcttggatgtgtaacaggcatgacaagcgggttctaggcggcgccatgatggtagggagtagcgactcggagacaattttcccatctgcttgacatgttcttatttttattcgagagctccctggggctttcttcgcagagccccccttggctcgccgcacccttctgagccaggggtaatttagcttggggcttctcttgagcttgtgcaacccaaattgatggggaggcggggcctggggaattgccctttgcaacaaggtgcatgttgcatctgtctggagcccttgcagatctgtaaatgcaagccgcgccacccctttctcccgaggggggacgttttaaaacttcagaagtctgtaatcagcagtggcggactcggagcccagtagaagccccagccacctgagctggatgaggtttcaggcgttgcaagtggtggacagcgcccagccgaggccggaaaagtcgatggggctcagttcggcgacgctcggctaggttcggtgcggtctgggcgcggggctcggagggagtcggcggtgttcggagccgagtcggtgctccggcggagagagccgagccgcttcggagggggtcgaaagcattcggaaatactcgggggaggggagtgcgcaggaggggaaggaggagggggagaggccagagtctgcaaattaactttgcatccgccaaagcaactgcttttcctgaacatgccccataaattaggttgatttaatgagaagtttaaaaatatatactgaatcccccaaaggggtgcctcgcctttttttattcaaagagagctgagctctctgaggaaataggtgtgccactttaggatgaaaattcctaattatgtactgggcaggaaatcttaaatgaaggctggatgtagacttccccaggaaagtcctctgtgtcttgtatttggttacaccgaggaggggggaaaatgaagtgagtgatgtttgagattgttaaatcagaaatcagagcatttcttctctttccctttacttctcctttttttttttttttttttccaaccttacaggacacctttttcaagaaaaatgtcaggaaaacagattttgtaggtaaaacaattttttttttaaagcacaatacaccaactctctttaggaagtagggtaggtctgttcaaaaggtccatcacaaaagtttctggttcctggtttgccacaagggaccctggcgtcctgtcctcctgaagcattcatgaatggcagttttccctgtgagccttccagcttggcttgaaatacatcagatcagggccttgtgccaagctgaatgcaggacttgttttgttaaccacaaaatgtgggattggtgtcactgtatcctagtaacaaatttttttgagtcctcccttgcagagatggtttttgagatggccacttgactgagagtcactttgagtcaggagaattctactgtggatggggccaggcccgaaaatctaggtggcatttatagaaagcagtttccaacttccttgtgcaatacaattggtgaccaacctatcaggccatatgtacaggttaattaggaagctgtgttgtttcacctggacagatgaaattcagcagaaagccctctttaggttacaccctgtgataacccagtgatttcctaatggggggctgcagtctaatagctcagcacattggattgagaggaagaatgtggatattcagacatcactgaataaaactccttttatttagcatttccagaagagcaaagagtcattccattgagcctgtgttctcatccttgttgtggtgtgctaatttgaagaaactggcttccatatatttccatagtaactgaagtgaaataataaaggaccggctggcaattgctgtttagaacaaagggttaacatcttcatcagcctaggaacattgcagagatactgacataaagttcttctgcttgataagtgttgtaaggggaaacgtgcatctgcttaagagataccagtttagagtgtcatttgaaaagcctgattctcagtacttatattaaaatttttatttgaacatagtgttttgggttcccccccccttgtgtgtgtgattgtgaattcgtgtgagggagctctgtgtcagacaatccaaaatatttcagtactgagaaataaacagtgataattgagacagcacaaatataattttatacataccatgtgtgagtaatcagtgactctttttttgcatggcattttaaataattttgcttgttagggggttgtgacctcacctgtgatacagcctcatcattttgtagtcagtcaataagactctgagttattcagactaatcagaaaatttttaaagaattgtcaattttatttaattgccaaacccttacaaagaaatcccataacaagttgtaattttatgaggtgtagaattgacagaatatcactttaagtgacttcccagttctgaacaaatagtgacacccacttggaccatgtacctggtgaaaatgtaaaatggactgcggaattgctctgggagccacagtttgccctcattcgaggtgctgaattttctgtaatgttgagttcaggctatctgtctctggagcattaagtggaatttttagaaagggagttcgaaggtggccatgaggcattgcatgctagctggtagtctttaccgaaatgggcacaataaaatcgagcactttggttgtgcgtccattcccacagtacctgcttagtgccattttaaaacaaatttaagaatttgcctgatgaagatgtcattgctcatacaaatattccagcctgacaagtgggatgtgattcagagaacagaccctaccctgtcaggaaaggctgtcttaaaaggtcacctgtcaccaaaaagctgatggctttttcctcccagctgaccctgactttgtaattagggtatctactgtttggtatgggttcagggcaagcttgcagtcttcacttgatcttagccaaaaggctgagaagcagtcaagcttgcattctttcagcacaatgctcttcagcacctactaaatgacaggcattaatggaggtgaatagcaacctacagccattactccatgaaagtgcgtccgtctaaaaggacatttcccacactggcccccagggtcgcacgttgggttagtattctactgagagccactcttctagatttgtagacttgttatttctgcagtcatctcaatggctgctttgcctccctcccttcgtccctctctatgtttattcaaatggatgcaccttgctctctggagacagcaagagtgcgaacggaatgtcagatcaagtagcagatgagttctcttttcctgatggatggtgctctctccctccttactgtgcactgagctgtaaataccagcagaccttcctgccagaagagtggcaaatagtccacccgatctcctcaggagtcagctgtggaattcttgagcctgggttacctattggattctaaagtagaacctatatgcttgttgaaaagggttgttgccagttagattaaatgggtgaagcttcatgagaaccaacatggctggaaaagaatgcagaacgtctgttctatgtgtgaacagggctggattagatttacgatgctcagagtgggagtgtgtcttgtttcttttaacacatggaactcgcagattattttgtgcttcttcacatgccacatctgctaaagataggacaagatcactcatgtttttcagctgctcacaataccctatctccgttaacactggagatttaatatgagtagaatgaggccctatttttccgatatgtgctcagcccatctggatactgggacttgactccctgtctcctagggtgttttcattctcatttcttatggagccagacaggccattatcaccagaatacatcttgatctgaaagacaacagaaaagctggtgaaggggtgattccaaactgaaaaaaacaaaacaaaacaaaaaaaaccacattttggaaagagttaccctcagaattgacactaatagagaaaacttttgattctgaaaaaagaaagtgtgcctgtttgtacatacccacagagtgtgggtttacaaatggcagatgttgagaagagcactcacctcactttcttactgattgcatcatcttaaaaagcttgaagatgctcaaatgaactccatcctaagaatttcttcaaatctgtgtcacattcttattttcttccatccctctcattcacacacagcattggtagaaaggaagctgtccaacagatctgtgattagcactgaggggaaggagaggagagagcagtggcttgttaactggttcagataaataggtagtttcttgtgtttagagaagcagtttagcatgcttctctaaaattgagagttggttaagagcatagactctgcaaacaggctgcctggcttcaaatcttggctctactgctaactaaatatgtgaccttacacaaggcccataacatttggtgcctcagtttccttacctgtaaaatgggactgataatgaaaataactactaataggattgtggagagcatgaaatgagttaacatatgaaatgtgctttgagtagtgtctagaatgtagaaatcattatacaaatgttagctctagtttttattcctttgattagtgggtgttcccttcccatgtggagttctcttgtcaagtaagtatgtgggacttagccaccctgagaagcagaaggggggtgctgtggttcatgttcatggcttcttccccttgcctgctctgcagcaccagttatataacaaactgtgttgtcataactgatgtgacatttttgatggcgcagctgcttcagcccaagagctggggtgacatttcaaagggtgggaaagagcactgaaccaggagtccaggtcagtagctctgcctctgcccctccgagggctcggtttcctgaaagagttggaccagggctaccccaggctcccttcctgttgtcaacggtgtatgaaattgggaattccctttgttttcagggtcttgatgttctcaatattaaagcatgaattatggttttatcccatgggggtgtagggtatccatgaaagttcttttaagactaagttaattgcagaatagcaacctcagccacagagctttgtcagccaggaaatttgtagttctgagagtcaatttgagaaaaacacctctaaccaaacttttcatgcagacatggttcttaaaccaaagaggaggatctgaaagtatctcattagtaagaaacaggatgtttctgggaggagagagccagtgacattagaagagaagtggtttttccgtggcttccaggatgctcagaagtggagacagccctagcgttcaccagaaatggctgcatatgaagaaacttgcctgggttaaggtgcctaaaacccagggagcagagagatttgcagactagtaaaaggggaggctcaggagaactgtattttaattttgattcactctctcatttaactttgggcagatcatttggccaccctgggcctcaatttgttcatctgttaattgggatgtgggttttcaccatagaatttctcagggctctttcgggtttccagctctaagatgcagtaaatgcaaagagaaacttagaagcctgaaaggcggtggggaatagtgggagtatttaccacccacagcttttatctgctgagccatctttagttctaattttctttacagagaagaggaaaaacattgtgcttttcatagcaccaaaaaattaaagtaaaataaaatcttgcaaggctaatagttggtgccctgaatttggccccttactctcttgatttgtcaaccatcctagaaataagtagaatggagaaaagagaaagggagaataatacataagactaggatttcatagctaacaatttaccttggattctctgcctgtgtcttagccaacagataggttttctgtagaatattgttacttatgagaatagcttctccatgctttaaaattgatcctggggtcacctgaccccagggtctcagagcactaatgcatattgcacattgtgaattaattaggtgtttatttgtctgtatcccttgctagcctgggtgtcccttcccaccagggctccctgaagcaaggatgttacttatttttgctcatagtacagcaccatgcccaatgcctggcacaaaggaggtcttaataaacgttagttaaagaaaaggaagaatacgaggtatataaggaatgaaccttattattctccataaaccaaaataatcatgttgaaagcttttggtggccatggaatgtgttcatcattttcaatctattatattcatttgtttatcaacctgtgagcaaatatagtcatcaattccattttacagatgaggaagtgaggttcaaagaagtaaggtggcttgctcaaggccacacagcttagtaggtgacagtgttgtattcagacaatgatttgtctaattctaaaacctgtgttcttttcgttgtaactccacacctttcttactagaccacccccagtatgggcagtagagacctggcagtctacgacctcacacccagatgttgatggtgccagctgtggttgaggtcagtggctgagagaatagaaagtgcctaattggtgctgagttccttctggaggtggtagtaatggtcatcatatatcacattgatttggataccagagtattccctagcaaccatctggacaggccttgaaatgatttttcattaccgcctcaaaaatgggggccattttcagattgcaacagagagaaggctctggctttggtggaggcaggtgtcttggagaactatggaaagacaggatggtaggggatccatccatctgtccatccataagcatttatgattgcctattttgtgggtagcatacacacagtgtcatggaagtagagaggaaggcctcagtccttgtcctgaaggaactcatggtctggagggagctacacaaaaaagactcttgcacttcaggtaggaagggccacaatgtctgtatacacagtgtgctatggtagaacagaaggcaccttctctaggcaggaagttcagggaagacagccaagagacaatggcatgtgaactgagcctttaaaacaagtggtagttcaccaggtcgaaaaaaaggaatgccaggcagagggactggcatgtgtaaaggcattaagatgtcaccacatggaacatgctaggagtgtaaaatagtttgatttgactagagcaaaatatgtaagaggagtgttaagaaatgaggaatgaaagattggacagaaaccagatcatgaaaggccttatctattgtgctaaggactttggattttattctgaagataatgagatgccacctgagggttggcattagatcacctacgtagactggaggagatcagctctggaggttgggagaccagatggaaagttacttctgtgacccagttgggaaaaagattaagaactaagttaaagcagtggtagtgtgggtggggaaaggaaacagattcaagagatatttgggcagtggaataattgaacttatttgttgatcagttggaagagcattgaggaggagataaattttaatgagtatggacaaaaatgagtccaggattcctggtttgggctactggtggatggtagttaaatgcaggaggaagagagaagacttggggagaaaagtgatgactgcatttggtcatgttgacgattcttgtggatcatctgagtgcagctcctggtagtgggtcagataggacacacctggggagaggggtcaatttgaaattctgtggtgcttttgagtggcgagagccatagaagttggtaaccttagtaggctgagtgagaaggagagagaaggcaggcatgcgtctcccatcacacacacattccagctccaggaaatgagaataatttaggaagaggaacctgtgagggaaactgagaaggggtgatctgagaaatgaaaaagaaaacccaaggcagagtagcatcatgaaagccaaggaagaaaagactttcaagggcaggaagtggttagttgagtcagatatttcagtagacaaataagatgaagattggcaggtgtccatggagtctggcaagttgttggtgaccttggcaagagcagtttcaatagactggtgggagaaaagccaaattgcagtggagttaagaaatgtgtgggattgaggaaatccatgaagaacccccctcccagcccaaaagaaatgtgggctacagaaaaaaaggagtgagaggtagggagggagagagccctcctggaagggctttgcttttattgttcatttctacatgggagtagctggatccattgagaagttatccagatccctgatgaatggaaaagttgaaggtataggaaggaggaagtggtagaaggaacacaaccccttaggggatgggtagcttgagcttgacatgaacgtgcatctccttccctaagacagacaggaggacagtaaggatgggaagtctgtagagaaattctagggcataatgatgaggacaggaagttgagggagctcctgccttagcatttcttttctctgtgaagtgagaagaattaaaaagcagctgtgcttatttactggagcaccaaagaccaataacatttattctattaaaaccactcatttattcatttatctaatatttgtctcacacctattatgcattaggcactgttctgggtgctcggagtgtcagtgatgaacaaatcaagtcccagaggaaccgggtaataacctcatacacaaacaatcggacgcagtaattgcagactgaaagttttttctggggttacacctttaggggaggcctcgtactgatcacagagggatccaatttctgccttcagagagttgcaccagttggaggagacaaattcaattctcaaaggtgcagaagaagcagtgatggaatttaatttggacacaggctcaggattaagctgggagggaactgggtggagaagtgaaagttgcacagacactgttgttttactccaccgagctttactcatcacaggctgctccagtggggctgccagtcactgccccctgctgcttgaagagagaagtaggttcatgactcaggccttgccattcacagcatctcattcctctggccacagtgattggcccagggatgggcatgtgactcaagtgaggccaatcatcatccttctctggaattttatagtcactatgagaaaaaagctcttttccctgggatcccagcaaggtcctcactgggctggaatgatgaaagcttgagctagctgtctgtggccatgtttccacatctcaattgccctctgcaaggaggaagcgtgcttatcatgggagagactgaggctttgggagactggaggacaaaagagagaatggagagaagaaacacaaagagagagggagccagaaagacatctgatggtgatactggtatctctgaagcaggttctatggagctgacagttatgtgaatcaataaatctcttcttttacacaaactaatttgagctgggattctgtcccttatgaccaagatcacgctgacgaaaagcacaaggccttccaggatctgaacaactagtatgagctaaagtacagaagtaggcctggaacattcaggacaccaccagggagtagtgggcaggctcatgtggctgaagagctggggtttgtgggaatgtgaagagaagtgactggaaaggaagagtagggctagattatagggttccctgatagtttttctaaggggtatatagggtgccaagtcaggagagcctaccagtaggaggccagagatgaggctttagagcaaagagatttctgtagtctgacctaaggaattggtaggaaaggcaatgagaagttggatgggggagagattttggaggcaggagagatgacccctggtgtctagttgaatgaacatgagaaggagagagtatatcagagaactcctccccattttgaacctgtgagatgggatttagttatgccatcaagttaggaaacacaggagcagggaagagatagcagagaggatatggcaggtgaacccataagcatgaatttcaggtccttacagggtaacaggaaatgttgagttgtttgcttgggaggtagttctggcatttagaagagagatctgggctagaaggaaaagtgggcttagctgcccttgtggtcgggccatgagagtggatgtggtgtccctggggtgagcatacatatggccaggagagggagggcccagggaaggggtgcaccattgtggcagtgaggaagggaaccttccttcagtagacccacaggtagctccaactggcaaaaggagccagagagcagagtagcaggaggcaaacccagagcgccctgccacagtggatccccaggaagggaatgtgcttcaggaattctgggtggcgagcagggttctgtttcatggcattgccaagttagatagtactgaggaaagaccattgtatttgaagctattgcgggcttttaaaagtgcagtttcagtggagggagagggataaaagccaaactcaaaaaatttttatggtagaaataggtctggactgggagtcaagaacccaagttctcatcccagctctgttcctgtttagcttgatggtccccaggcgagttccttaacttccttaggacttagtatcctcacatataaaattaggaaactggatcgcgtgatctataagcttctactcaagtcttgaggtcataatttatatctttctctccagcaaaacagatgttcttgtggcaaaggaattcccctccttctcccttggccacccccaactgacataataaattataaaaaaaattaagctttcagaactctagtgctaattgagaaagaaaactgggacatcagctcagggaattgtggacaccagtgcatgttgtgtccatatgtactctccactgagaatgtggggccctgcgatgtaggaatttgtcttgtaatactgtcagagttatgagacctggatggtttgacgctgttccacagggagaagtgctgaaggtggttccacagtacaaagacaaaacaactcctggggtccctctctgaattcacgtggaaagaaaaaggaaggctgtgaatctgagctggctgtgtgcaggagctccagccagggcagacaacaagagctggagggacccatgcattaggagatggacaagcctgagggcaccagtgggcaagggcaggagaggcacccactctatctccctggtactctgtggcctcattggtgggaggaccttggggaagggatggtagaatggtgatgtgtggagagcctagttctgagctgtggccattcttcctactcttaattccccatgtgctatggaaggcctgtttcttctttgaatcctttccttagagtttcgaccacatggcccttgctattccctgtcttctttggtgtgggtttgttcattctgtgaaggccattggaagaccagccatagtttggcactttctcagtttctaggaatagattctttactaagatagacaagctccctgcctcaaggaccttacagttttagagaaggaagatggtacaggaataattgaaggcaaaggtcatttcatatagtcatgcgttctaaaggaggaaactgggattaaataatggagagggattggaggacatgaggggtaaaaaagcagatcaggaaagatctgaggaagagggaacagcagatccaaaggctgtggcacagacatgagcagaaagaaggccagtggagctctagaccacagggagggaaaaatagcacacaatgaggttaaagaggcagttagggccgggcgtggtgcctcacacctgtaatcccagcactttgggaggctgaggtgggcggatcacaaagtcaggagatccagaccatcctggataacacggtgaaacctcgtctttacaaaaaatacaaaacattagctgggcatggtggtgggcgactgtagtcacagctactcgggaggctgaggcaggagaatcacttgaacccggtaggcagaggttgcagtgagccgagatcacgccattgcactccagcctgggcgacagcgtgagactccatctcaatttaaaaaaaaaaaaaaaaaaaaagaggcagttaggagccaatgttcaaggaaggcctgttggctatggaaggacatttgggtttcattttgaatgccgtgggagattgacaacttgacctgacttatacattaaaagatacctctgcatcctggaaaaggcaaaaccacagggatggaaattacatcagtggtttccagggaattgggtgtggatggagcttgcaaaggggcacaagggaacttttgtgggtgatgtaaatattttctctcgtaattgcggtgatggttacactactgtgtatgtttatcgaaagtcatcaaactgtatacctaaaaagggtgaattttactctaagtaaattatacttcaataaacctgacttacaaaatgcatattttttaatcaaaaaaagaattgcagtaaggcttaacagaatccctctggccgtcctgtggaaggtacatggcagggagcaagtctggaaacagggacggttgcacagtccaagccatacgccccttcaatgctgtgcttacaattcagcctgtattatttgctgatcccagtggcttccttacaccagcttattgatgtgtgttcctagttttcctgtttacctagcttttccttcaaaactggtttgaaacctcagtgtggatagaaaccatctgcttcttttgtatgtgcccatgggagatggcttattacatattactctccttacatttaagtagtctttaacatttgcaagcaattcatgatctcctttgagccttacaacatcaggctgcacatatgttaccatgttcccattttacagatgaagaaactgaggcgaaaataattcagtatagcagtgtgaaagaagcatgaactttggagattttggctttgccatttgttggctatcagtgtgatttgggaaaattattcagtctctctgaacctcagtttactgattgttaagaaaagaccaaaaaaataaataaataaacacactgcagatacactgtgaggagtaagtgagataacacagctaaaagcaggtagcagataattgaaattccctaaatggtagctatttgtatcatttttgctatcagagaaaacatgatttatttaaggtgatgtggccagtacgtggtagaactagagcctagtttttctgattctaggtgtgtttctctttccatcacaccactcagaacattcttaattgttatcaattaattgttccagggctaactactttttaccaacttggatgcttaaatacaattgttgattattcagcaaatatttattgagcactcaccatatgttcaacactgttgttgacacaggatataatagtaagtcaaaataggctccacctctgcccctacaggtaataaagcagaatggtgagggagcacctacctcggtgtggggtctgggaagacttcctaggggaggtaacattgacactgtctttaaaagaaacatttttgttgtgatgtagatcaatatacatgcaaaatgtacattaatcttatatgttttacagatttttagaaagcaagcactcaggtaaccatcactaggtaaaaaagtaggacattgctagtgcccaagaatgtccctaaatatccctttttgatcacagctccctgcctcactccttactaccttaactttcgtggtaagtttcatgggtccttgcctttctttagagtttaccacctacatatgcatcctctaatcatttagtctagtttctcctggttttgatataattggaatcatgctatttgtatcttttcttcagtattacattcataatatcccagttgtatgtagctggagttgattttcattgctatatagtattctatggtattcattttatgaatatttttaattttcctatgtagcattcataaatattagtgaatattcatgaatatgctatatattattcttcacctcattgctatatagtattctttgttacacaccagctgtgactatactgtaatttatttatccattctactgttgatgtggcattttatcattttgagtttggagcagttataaaagatgctgctatcaatgtgtgtgtgtgtgtgtgtgtgtgtgtgtgcgcgcgcgcgcacgtgtgtgtgtgtgtattctggggcacatgcatttgtgaagggttctttgaagaggaattgctgggaatcttcaactgcattagataatatacagtgttttccgaagtggtaattccatctttatattcacggtagcagaaagaatttctgttattataaattcttgctgccaatatttggtactgtccaattttttcaattttaccaaaccaataggcaagtagtagatctcattgtggttttactttacatagtctagattgctaaagaggttgaacagcttttcctatatttattggacatttggatttcctcttttgtgaggtacctgttcttttgccactttttaaattaggttgtaattttctcattaatttgtaggtgttctttatgtgttgtaaatactagtcttttttgtttttttgttttttgttttcattgcaaatattacctcccattccctggcttgtcttttcactttgttaatggtgttttatgctaaacagatatttctcttttttaatgtagtcattctttcagtctccctctttttggttagtgttttttttgtgtgtgtcctatttaagaagaagtctttccttatcttgaagctcaaaggctaccctctatttcccgcctctttaaaaagctttggagatttattttattttctatttaactgtttaatttacttgtagttgattcttgtgtatgatgtaagttgttttttctctaatggatactcattggttccagctttctgtcactgtttctgtggggccaccactgtcataggttaaacatgtatgtgataagcatgcagggacctgtttcttagctcatatagcatcccattggactctattcttatgacagtgccacactgtcttgattatgatagctttgtaacatgtcttgatatttggtttagcaaatcccactccccttggtcttcatgagtgtcttggctgttctcagctctttgtgcttgcatgtaaatgttagaatcagtttttgtgatgcatgcacacacacacatccctattaggatattaggatctgttgattagtatttattcgaatccactactctgagtagaattgacatctctaaatcttgagtcttcctgatccatgagcatgatatgtttcaccattatttatcataatttcttttaagaaatatttataatttttcccatgaagagctcatgtactttttgttagatttataactagatacttaatgtttacaatggtcttgtaattgcttcttttttttaagagcagttttagattcacagcagaattgagaaaggggtacagaaaattcccatacgtccctccccacacacatgcccagcctcccccttatcagcagttctcaccagagggcacagttattccagttgatgaacctatactggcgcattataatcacccaaagttcatggtttaccttaggctttactcttggtggtgtacattctatgggtttggacaaatatgtaatgacatgtatccatcattttggtatcatacagagtattttcactgccttaaaaatcctctgtgctccacctgttctttgttcttcccccaactcctggctaccaggaatgtttttactgtcgctatagctttgccttttccagaaatgtcacatagttggaatcatacagttggactcaaaagacttctaatatgtagccttttcagattggctttttctcttagtaatatatatgtaaggcccctccatgtgttttcatggcttgacaacttattttcttttagcactgaataatattccactgtctggatataccacagttgtttatccatgcacctactggagaacatcttggttgcttccaagttttgggaattatgaataaacctgctgtaaacattcacgtgcaggtttttgtgtggacataagtttttaaatcctttgggtaaataccaaggagcacaattgctggattgtgtggtaagaacaggtttagttttgtaggaaactgccaaattgtcttccaaaatatatagatatatcatcttgcatttctaccagcaacaaatgcgagttcctgttgtctgcaacgtcaccagcatttggtgttgtccgtttttggattttgtccattctaatatgtatgttgtggtatctcgttgttagagaaatttggatttctctaatgataaatgatgcggagcatcttttcatatgcttatttgccatctgtatatctcctttggtgaggtgtctgttaagggctttggcccactttttaattgggtcatttgtgttcttattgttgaattttaagagttctttctatattttggataacagccttttatctggtcttttgcaaatattttctcctaacctgtggtttgtcttctcagtctctggttaattgcttcattttttgaattgcattttgtatctgtttctggtatatagaaatacagttgacttttgtgtattgatttttaaattgatccaccttaattgttgtataattctaatagttaatttgtagattctaaggcccagagaggggagtgatctgactaggttcctatggctagctagtagcagagcaagcatgaatgtggtcctatttctgctgacttccaaggagagaatattcaggaagggttagggaaagccaggtggggagtaggaaataacatttattgaacacctgttatttacaatgcttaatatgcagatcagcttaactctcattggaggcagattattgataacccctttttatagatgaggaaagtaagattcagagagatgatgaaataaacgtgttcaggcacatcactgaaagaacagtctacggttggaggagtgctgttgctctatcaagcatacaccagactacatgccttctgcatttgagcatagacacccccagaactccctgggcctcctacctccagctatgccgtcctccagggtcccctcccagcccagctctggggctgcctctattaaggctctgctagcatctctagacttgtgcaggcctggttactgtcaactcttgggttgagtttctgcccaaagttctgaggtcagtctccacccctgcccttctacatagttccctcccaaccaaggaaatgagttcacaacttgttgagttctaggaaccaaattaggagttgctctgggcatcttgtttcagtcgcgacttgaaaatgcggttgaggttttatgactgctttgttatacagtggcctagagagaatttatggtcgcagtgcttcccagcaccccctcccgcttctcgttgattgtccagagctggctgcatacaaggagagggtttgcttctgctggctgtgcaaaggcatggggaaatgctctgtgtgtgaacacagcccagcagtgctctattcagcgtgacaacttcctactttggaacacatggctcttcacagggtgactgtaaattatgcaactccagagtcaaagaatgaggaataatgggggaaaggaagggacaaactgcaaacttcagcctggatctgaaatgtgagtgtggagacccaggctgcttggcaattgatgggaggagagtcttcaacgactgagaaaaaccaggaagtcctgtcgggactacttgtgagagtggcttttactgtttaaaaaatgtaaatgttcttttcaaactctgtttatcaattcagggagagttttagaaacttggagggacatttacaaaagaaagtagtcacatgcgttaccaaaagtaattgaatgccatacatggtatgtaacctttgtcccgatggctccaactcgtccttttttattattgcttcatgctaaaaattggtgctcctaagggcaattgtacagattctcaccttctcctccacccgcaatggtcctggaatgcagtgaactctgcttcgataagctttgtggaatgttcctgtctcttggctgactgtcatctctcatgacttgctgctttcagtggtcccacctcaagcattattccccttctcttgttctgctctgaatctgcgatggcccagaaaactaaacgaccagatttgtcacaatagtgtgtagagcaagaatgaataggatataattgaggacctgaggaactcttctagaagtagagtgtttgtgctttagtgcttggacttgtctgcatttctgcctatctatgacacaggattaagtatgtaaaaatgaattggcagttactatacagatgtaagtgatggtgacaaggtcgctgttgtgctatgtgggtgctcagagttcttcattgtgcttgtccttcctggctcctggtagggtttcgattcacagaaattactggacaggtagcttccagataagagtgatgaactatcatttctgacaaaagatgttggacaggctgtggcagcaaggaggtgatcagaagactccctagagcacaggggatctggcaggctttttctataaaatgacatggatacacacagggtcaggctgcctgtgggcagagacgtccccaggagccctgcccggtggccagcaccacggacatctgctcacctgtggcagaactcggagtctcacagctaagccaggccagacccagttgctactttttggtcaagacccgctctaggaattcttccagggaagagggaatgtgaatttgtctgttttcagatatgtgtagcctttacacaaaagtgtttgaaattatttggttaaaatgctttccatcgaggttattctttctttcttcttttttttttcccactctgcagatatccattgagcttctactctgtaccgagcaccatcttaagtgttgtaactgagcaagacacacaaaatctctgccctcctggagtgttctgacattcttgttaggggagacaggcaataaataaggaaaatacatagtagtattatacatcagctggtgacaagtgctatggagaagaataaagcaggcaaggggcatgagcgggagggaatgttagttttggttttgggggtgtttttctgagatgggatggcggaggatgagtcttgccatgttgtcaaggctggttttgaactcctgagcttaagtgatcctcccaagtggctgagattacaggtgcacaccaccatgcatgccttgatattacagttttttaagtcgtcagggagggccatactagaagatgaaattggagaaaagccttgatggaggtgaaggagccagccatgtgcacttgggggaagagtgctccaggcagccagaaatagacagtacagaggctccaagtcccgagtctgcccgtgtgcaaaccacaaggaggtttatatgtctggagtcacaaaaaaaaactggaacaatgggtgccctcatggagtcagtagtttctctgggtgtggtctcactaaagacaggggcgggaaagaaatccccatcacagactcgtgtagacctgtgacttgtgggcattcagactgtgttattccgctgccaggcctagggcttgggggtggtgtcctgtggatgtgtgtgtgtatcctgacaaaggagggacatggaagggaaggatcccttccatgaatgaagggggttgactctggcataatctaggaagaattctaggaagactcagttatttctggttggtttacaggagacaaacactgaacatgttgggctgccttgccttgctggtctcctagtggaggaggctctcattgctggggcttcccgttggccctagctctgcatctgctctcccatatcagcattaccagaccatgagcactgaggctgtcacaggacaaggagcctggccccagacctcattcagggctgctgacccagctttgggctccaccgtagacgtgctcagtaagcaagcctggggtctaggggcagacacctgggagcagagtcacaggggcaggtttccccaagtgtagcctgaaagtttagtggtatacaaatacacactttattttaatgtgttttaggacaaaaggttcctaacacatcaaaaccatagttttacagataattattgcttaggatgaagttaaagtaaacaggacgtttttaaaaagacactaaaaatcatgtgggtggcacaaaaatcctatctaagtagtgctaacctcaagtctgccctcagcatgggagtaccaatttctgtctaggggttcccatctcttagggatgagaatgccttggaagaagtcctcctctgccatcctgggaacacagtagctgtccctctgtcccaaccccaagcctgtgagctgtccacaattctcacttcttcccaacacttgcgtaccgggtgtttctgtcccatggcctgtgcctggcctgggccccctcactgccatcacctcccagccttcctctgggtccggtgcataaagtctcctcagctgccttctagaaatgctgtttctgcccttcactgccatgctaagtcaccctctgcattgggtctgggcattggcttggcttggaggacataccatggtgtagtgcaccacactgatcctgagttggctccccctactacagaacgccttctccctggcacccaccacctcctgcctccatacccatagctggtggctgccaaagcatgcttcctcctctttctctgtagatctggcctccaagggccgctcaagtctcatctggtccatggggtgttcctctggaagctgaaccacactggtctctccagttctgtaattcttttacacaggatgtctgtaccccaccattaagagtttttatatgccctcaaggtcccatagagatgacttctttgtctatctgagtttcgtagacacacgagcaaacacacacatgcactactaccagaacagaatagtcttgctcaccatgagcctgacacagagctctgtgcgggagccaattgaagagaagcggtttcagcacaatgaagggtaccagcctggcttgaatcctggcagtgctaccttctagttttgtggccttgggcaactaggtttgaggatgatatgaaacagtgtagaaattactgagcccagtactaggaacataataagataattgtggttgttattgttcactaattggcaaacatttgctatatgtacgtttggttccttgtctaggctgtaaacctcctgtggattcttggggcacagtgaatattcagggtacatttacataataagtagagtggtccatttacattgctgtgggttctctcataaattggctgttaggtgtagaagtttttgcaagcttatatgaaacttcagtatacatacatgatatgtatcatttgtgtgtttggttcacagtgggttaagaattgttgagcttatcaaaccacagttctgtattgagtacttactgtatacaggtgagagggaagtgtatacccccactctcttcctgatgagaagactgctgtctctgactgtcccatctcctttctccacagcttggatgtgtacctctgctccctatctctacagatcttggagtttttagctctccagcaggtgctaggaccaggtttcagcaatagaggagtgggtggcagggttgtagtgctaagtgcaccattctttacacttatttctactgctaggagcaaaaaaatccaaaggaaacatcatcttggtttaggcagtggttacacaggtgacacagctataaaaatccactaaaatgtacatttaagatgtgtatgttttactataggtaaataatatctccattttttaaaaggtgatcataatgctttttgttaagcaaaggaagtcccagggaattaagcattgcccctctgagttcaccagcctcaattccactgggagggccactcagccgggggaggtatttgaacccttaaaagtcaaggatacaccccaggcagcctagttttccctactcaactcttaggcattggccatccatgaaccttcttcattcttcacatttgcaccagggaagagatgccccagcacctgcttcaggccacagctctttctttggcacaaacctgcctgccattgtgaatcattaagtgttcaagtcttgtctctgccaccttggggttttttacccactataaaatggcgataagacctgatgtggctgttaggagtatcaaatgatataatggatgtgaaagtctcacaggactgtaaaatataagctgtcaacaaagtgcacctccaagcccagcttatttccacagtattcaagagccacaaggtttggaagagtagtaaagtctagtggttcagcaggtaggctctggaggcagacagcctgagttcattggtcctggccctgccacttaacagctgtgggacctcagccaagtgcttatccccttggtgcctcagtttcttacattgtcaaatgggaataatgatagcacttacccacaggattgtagtaaggattagatgagttaatccagataaagcacttggcttagggctcagctatgcagctaatattgctgggagcaagggtctctgctgagccttgagagaggacatctttattgggcagaaacagacaaaaactgaacagatctcatttggatataatgcttcatgtcctggctatattttccataatttggagctcaagattgattggtaagttttttcatgctgaaaccattcatctttcgagttttcctaataaataaaggtccctgtgacatgttcttgccttcagagttttgctgcaccatctatcgtgagccctctgatttacaattcagcaaaaaagtgacagactgggtattcttgttcaatccaaggtgattgctgcatagtcatttttaataagacatcagatttagctaaacgcttgcagtgaggtattgtgcatattaaattcaggatgctggttatacgggctgaggctctgcatctttctattgtgagttgtgagtttaaaaatcacataaaactgacatagtggattctttgctgcctaagggggcaagagacccttgttattagagtcaagtgttgactctttctccatctagtgaataaagtaagtgaagtgaagtattgaatgagtgtttgtgaggccctgggtaagggggttacatttgttgaagggctggtgagtgacaggtgttttagatgtaagattatttaatcatcaggcattataacatgagttaggtattatgactccctgtctacagatgggaaaactaaaactagagaggttaagtcaggtgtccaagttcactctcttagggttgagccaggatgtgatcctgagagctttcctaaagccccatattgcactattttagggttaccattaacagtatgttatgtatgaacgatcttattcctgagtagcttaaaatcaaataggagagacaaaacatgtaagcaaattaacagcaatgcatggtaaagtcccataagggacagagaatgtgctgtgtatgttcctaggaggaaagaggcatttgttcagatggaggcaaggaagatgccaaacaactcaccatctgaaattcattttgttgggcctagcatttttatcctaatgtccaagtatgtatttctgatattctaagaattgccaaaaataattatgaagctgtgcctagccccaggtgggcgagagatcctctcaaatgtcccactgtagcatgtctctttatttcctttctgtcctttgctgaaaatgaaaaatgtcccattgtactgagtagagctgctctctccctaagctcaatggccatctggctcacaccttcctgaacaaagaggtgagttgtatctgggcctccactgccttgtgtagtagttgaggacagaccatcacccaccagtcttttggttcttgcagggatgttgaggtgacagtatcggtggagaaaacccaagtggagcacacgtgccctgctgcagcaggctcggcaggagagattttcggcagataaaatgagagatgacgagacctggtgaacttggggcccaactataccatcaccgtgatacttggctcggtgggccaccagcacttgagcagggcatgtactctgcccctgtgagagcttgacagcaacccgctgcccagtacttcctgcctggtgtgaccctgcctgcccccacccagcttcttcccttgcccattgccatgtctctctctatgctggaaccacactggtcttccatccgtgtttgtaagattttgtgtgtgatctctcactcatctccaggcctttgtccatggtgtgccctattcctggaggcatcttcaccctgctttttgcttggccaaaggctactcacagcccatgcctcagcatagatgtcacctcacggaagccttctttgaacccatagaccgctggtgtttcaattgcacattgaacagaccgcccctcactttacactgctccttctattatcttttcattgtgggcatgcacccacacattttttaaaatgtgaaacacaccactttaggggaatatgctcagttggagctgttcttgccctcaccacacccaccccccaacccagctgctcttctgagttggcccattgtggaaagaagccattgcaccctaggaatatcatggggcatgaccacctaatgtcaaggacacgtgccaacggacatgttagtgcaccccgggagtgtactggtgcccaatgaccataccttttccatcccactgggtcttgtttgaaaccaccacattgggtttaggtctgctattgttaacccttcctattgccctgccttcttggagctccaaagaccttctggcagtgagttctcacctagccctcccctctctggcaagaccctaggtcagggaggaaggtcctgtgtggcaagaaagcctgtcaggcttgggaagtcaaggcaccccattgcatctcttctcctgcttaccattctcacagcagaaagcttcttgggggagtccttagtttgtcagctcatcatgactgtatgtcctccagaaaaaccagggtttttaaaagagttttttttctttggtatcggatattaggaaatgtatccttcacctaccctctgccccttctcccagaaaaagagactaatgcacagagtggaactttagattttcttaaggtgtacagcaaaccagaggtcaagacttgaacccacatcttttgacccttgatacaggccctgtccattgtcccattccactttttgtgtggctccttcatggctctgacctcccccattctcgggaagaagcctgaaacccccggcctgcaaaatagcccttgagagagaagcatctggaagtgtgtgctaaagctcccagagcaatggggggattctgccacatggctgctgtcagtagggtaaggttctggactctctaaagtctgagaatttgaattcctagaactagagaaggcccatgtcagttcaaaagtcagagcagaggaaaattaggaatcttgtttttaatgcagaggaacaaaaggagtggaaccatagccccagaaatgtcaacagaaagggcagaggtgaaggtggcccctgacaaaacttctccatacctattatttttgtaaaatctccccatagctctttggacagccatgtgaacagatatctttggcctctttttgcaggtaaagaatctgaggttggaggcaggctgggacaaggctcctgagtcctagcctgggggtctgccatcatacctacctgcttacaaaaaaatcacctctatatcctacatataccctttcctcccacgtatgctgtttcctcccctctgaaaaaaagtacctcagaatgtgctttcagagatcattctttcaaaaattgttcactagagcctactgtggccaggttccctggtaagtccaggcttccagtataaaatgacatatggactttctcctgcaagcattcacagcattctggagaagtttggggtccaaaactgaggttcttaatgtcttttgggtcacaaacccctatgagaaactgatggaaactatgaagaatttccttagaaaaatgctcctgcattttttaatttaaaaaacaaatgtttgcgtatgggggttgctgtggtttgaatgtgcgtcccctacaaaattcatgtagaaacttaatctctaatgcaacagtatttagaggtgaggcctttaggaggtgcttaggtcacaagggttccaccctcgtggatgggattagcgtgggttttttgttgttgttgttgttgttgttgtttgagacagagtctcaccctgtcacccaggctggagtgcagtggcacaatcttggctcactgcaacctctgctgcccgggttcaagcaattcttctgcctcagccacctgagtacctgggattacaggtgcctgccaccgcgacctgctgatttttgtagttttagtagagacagggtttcaccatcttggccaggctggtcttgaactcctgacctcgtgatccacctgccttggcctcccaaagtgctgggattacaggcatgagccactgcacccagccttggattagcgttttaataaaagagctcaagggggcaagttcaccccttccatgcccttttgcccttctaccttctgccatgggaggatgcttcaagaaggccccactagacactgaatgccagtgcctcaacgttggactccccaacctctacaactgcgagaaaataagtctctcttctttataaatgcctaatctcaggtattttttttatagcagcatggacagactatgacaggggttagcagtctcccagaggcagtctggggacccaccacaccctgcctcaagtgttcaccgatttcagatgaagaagtcatggggccaggtgcagtggttcaagcctgtaataccaacactttgggaagccaaagtgggtggatcccttgaggtcaggagttcatgaccagcctggccaacatggtgaaaccccatctctactaaaaatacaaaaattagctgggtgtggtggtgtacacttgtaatcccagctactcaggaggctgaggcaggagaatcgcttgaacccaggaggcagaggttgcagtgagccgagatcgcgccactgcactctgcagcctgggtgacaaaaggagactgcatctcaaaaaaaaaaaaaaaaaaaaaaacatgggaccagatgatgcagatgatgaaattatagtcttgttcttgagaacagttgttaattctccaaaggaagcttgtaccacggggtacaaggataaaagcatgggtatgatttttctggtcatcgtcatcattgtttcaggagtcaaagttgtacacatgtcaatgtcctgtggtctttgattttttcccaggttggaggggaaaccaaggcaggaggggtagccagcaccagagccagtaatggtgtctggagagaatgtagccatccaaccccagtgctctgcttctatgcagggatggcaagaggctaggtgggatgttgagggaaacttaggaaaagagctggaagtcaagcacagaagttttgcaatggagtttacaagagtttttaagataactcaactttgagatgaacaggagattgagaaagcctttataaggtcttcctaagtgatgctgacagctaagagtggcatgcccctgagagtctatgattatctcgcaggagagatctttatgggagccttattaagaacagagcatgtcagtgggagggagggagggagcagcagcgtgttcacagctctggagggcaagtgaggcagcctccttgatttgcaaagtgctttgcagtcctttttcattatttctgcaacagacccatgagatgggtagagaaccaccctgctccccacaaattgtagaacactaggaggtagtgggctgtccatctaaaggtgtccttataataactggatggtccctgggtttgcccctctacaaccaacatgatgtgataacctagattagaatgcctccccactccccagaccttggagtcttgtgattgcttgtatcagtggcctcttcagaacaaaagcatacaagcttgtccttctatgagattgtaacccctcaagcatgctcactagttggaggaaattctgacagccctactccaggcttgaggctcgccctggagcctggtaacttgagcctccatcgtaggtgtgtgtgagaaaggaaatgcagaaatggagtgagccgaggaaaaacccaggggcgacagatcctcggagagcatttcatccagtcctttcccttgacacgtgggagagcaatgtgacacggctttgctgctagatggtgaagactggcgatgaggtgataatgatagctagcatgttttgagtgccatgtcccaggcatggtgcctgatatcacctgtgcaccctgcgagatgagctttgcagcgtggttgagtatctgtgttatatacagagaccctggtgctagagccccagcacccagctccagcaccttctgggtgtataactgggtttcttattgtggctgtttcaattggccacagattttgtggtttaaaacaataagatgtattgttttacagttctattggtcagaagccccattcaagttcaccagcctaaaatcaaggtgtcagcaggctgtgttcccttctggggcttctaggggggagaatccattccttgctcttggagattttggcagaattcaatgcctgccgttataagagcccccttttcatcctggctggaaaccgagggctgttcccaggttctagaggtggctgccacatatcttggcagaggcccctgctttcctctatcttaaaagccagcagtggcaagttgagtttttctcaggcacatctgactcttcctccattgttatatctctctctctttctctgatccagccaggaaaggttctctgcttttaaggactcatgtgattagattggacctacccggataatccaggataatctccacatctcataaccttaatggcatctgcaaagtccctttggccctgtaaagttccagggattaggatgtggacctctttgttgggagagggggcattattctgctcatcacagtgacctagggaaatttgcttgacttcttggtttaagtgggaaagatgatggtacccacctttgggttatgaggatgggatgtggaacccctcatagcacctggaatgttggtaaatacttagttggtgttagctgtgagggttgttatcaaacctgttttacggttgaggacactgagatttaagactttgagtaactcacctgaagaacaagatttaaactccttgcgagaaaggacaaactgcactgtattcatctctttcatcccccacagggctggcccacaaaagatgttcagtaaatggatgttgaatgaatgaggggaaccagaaagagtaaatgacttgtctgagtgctgttagagaaggtcagagatgaagggactctcagaagaggtcaagttcaagcctttcatcttatacctgggaatctgaggctcagtggggaagcggggcctgcctcagaagatgggcagtgcagagccccaggatgtggccagtgcctgtctggccagtacgtcttcctctggaccaggccgtattcatttccctggaggtctctagatcctgtggtctaagccaagccagaagctggtccagtgggatagaagtattgattctggcctggcccctggtacagcgtcaggcagaggagctcagtagaagagtgagaggtgagagtcctgcctttcttcctgcagtggcctttggagaagcctatctgaagcttgttctcaggcttctctagacctccttaggctgctacccggtaggatagcagccagatagatgcccatggcccactcatgcccatgttaataccttctgctctgacctaaggctgcatggcatagatgggggactggggttttatttttatttatttattttgaggcagagtctcactctgtcacccaggctggagtgcaatgttgtgatctcagctcactgcagctttgcctcccaggttcaagcaattcttgtgcctctgtcagcctcccaagtagctgtgactacagcgtgcatcaccacgtctggctaattttttgtatttttagtagagatggggtttcaccatgttagccaggctagtctcgaactcctgacctcaagtgatccaccaaagtgttgggattacaggcacgagccaccgtgcccggcccaggacttgggttttagtctgcccatttacacttacggctttgtggtatttagggcatttggctccttgggactaatttcatctgtagcccatctggacacttataaggtctcaaacaatcctcgtttcaggtgccctttagaggatggttcaaaaactttcacatcagcctcagggacagagctgtgctgtcattccaagggcttctggctccactgaggctgaacacaacttggcagccagtgaaatctttctggacagctgatagtgtcccccatctccatgggagccagctaaggtaggacagggtgctaaccagtaactttgctgtgctaggctgcccctgacacaaggcagccacaggaaaagccattatatctctgtagagcaggatgtggcatttatgctgtctcattggaatcagggcttcgttgtctgtttgtttgaggaggattgagcaaaatctggattggttttcctaggcaagaaatgccaagtgtcatgatgtcagggttaccaggtaactgagtagaggaatggaatatatgggtggtgcctggaaaggggagctaatacgtgttcctactacataccagctccaggcttggcacttttgtgcattgcttgccatggtttactgcaggtatgacttgcccagttttacagaagagaaaatggaggttgggaggtggtgactctccctgatcacccagagggaactagcagaaattgtttgggctctagctagttaaatatgagcttagttcagttgccaagtcaacatctgtgtgtgtgcactctgttgagatctgatggggctggagccatcttctctgccttctaatgggagggtggagttcattctggtggatagggaatcaataaaacaggggtataaaaatgatagccccatccattagtaagacagtaagcatttattgagtgtcttctgtgtgctctgttctagtcactggggacatacctcattcagggagctgccattctagtttcatgaagacggagaaacacacaaagttaactaaatgagatcgttgccagcactgagtgccatgaagaatgtgatagaggatagttgaggagctcctttagctaaagtaggcagggagagcttcctgaaggaatgaaatctcagccaggatgcaaatgatgagaatggggcagccatggaaaggtgtggggaaaaagctttccaagcagaaggaacaggagtacaaagacagtacaaagacagagccagtggtgagcctgagtgtgcagggaagccattggaaggagttaattaggagagagatgatctgacttctactttgagtttgctgtggctgctgtgtggaggacgggctgtggaggggcaagagagggagcagggagaccaaggagggggcatcatagcctttcagttgggtgaaagatggtggtaactgggaccaagtttgtggcagtagacagtgagaaattattagaatcaggcagtattttagagttagagtcaatagggcctacttatgattaggatagtggtgtgctggtaaaccagccaagggtgggagggaggcccttgttggtagagcttgccagtttctgtggtgtaatattcccaccacagctggtttcaagctacccatctggccagtgagtgatgcaacgttagctcttgtgagccagcacaactcactccagcacaccactgggtcaggccatggaagatagaagcaagaaggactgaagagcattccatggctttgctctgagcacctgggtagatggggatgccgtctactgaggtaggaaagactagaggtggaaagaaagatcctggggcagtggcaggaaaaaatggttttgctctggccatgttaatttttaaatgcacattagatatctattttataagttttgggcacttgcatcctttatgtcatttaagtgtcagtcctttcaataactatgagtttggtggtttcttctccattcacagaacaataaaccgaggatgcaagggaccaagaaacttaaccaaggttgtacaatcagtaaatgacagagctggatttgaacttgggtctgaccctgccccaagggccgaatcattgcccacactgccctccagaaagcatcccactcttagcttgatgctacatttttgggatttaaaaggggatctttaggaagttttgaacagcctttataccggagaagtaatcacagaatggttgctcagagaccagactctgccctttgatgtgttgtgtggttttgttttttaaggggtgtggcgggtagggaaaaagaggaaggtggggaggggaaactgtttgtttcattttgttttattggcccatgcagtttttttgtttttgtttttgttttttaaagaaaacaagaagaagaagaaagagagaaatgtaattgttttaggcaagtctgcgcgcccccgccactgctcctggcctcctccattccctgctgtctcaccacctgcccatttgacacacgtgacacttgcttggctcaggaggcatccagtgtcccgtgctctagaggagcccaggtgtagtggcctctgcaggcaggctcttggcttcatccttgcacctcagggagtgagcacctggttcccaccctgtctccaggcctgagccagtcactggggcctggggtgtgtttgatttgcactctctgctgctcccttcctgaccactgccagctacctaagacatcactgtgcttcaacggtaagagctgtggtctttggccaggcacagtggctcatgcctgtaatcccagcactttgggatgccaaggcaagacgatcacttaagcccaggaggtcaaggctatagtgagccatgacagtgccattatgctctagcctgagtgacagaggaagaccctgtctcaaaaaaaaaaaaaaaaaaaaaaaaagaattatggtctttctgattctatacatactaaagcaatcccacctctttccctggctttattggtattattttccctggtattattgttgttattttgctaacataatgaggctcggaggcatggtttttctgccttttggccttcttgctggtgatatgttcaatttaatggtgttcttcagtgtcactaggcgtggctggagctgagtggaagctgccatcaggtagtctgagaggagcacacaactgcgtaaatggctgtgtctgcctggctcccttggaccgagaagcctccattccctgcctgggcagtgctgggcttggttacctgaagaggcatagcaggattgacaggaagctctcaccccacggttggcatgaccagatagccctgagcatgatgccagggctggtggcactttgcagagccgaaaagggaggccagcctgcatccatctgcctccgtctgcacagttatgtgttccaagtgcaaccagaagaaggcttccccaggcttagccagggccaccaccaggccagactggaataggccgagacatacccagagagtggcagggttctcctggcatttccatgtatgtacctctttagtaaaagatgtttgagctggtaaccctgtgtatatgcatatgtatgtgtatatacgtgagtgtgtgtgtgtatatatgtgagtgtgtgtgtgtatatatgtgagtgtgtgtgtatatatatatacatatatatttatttatttatttagattatgtatattaaaatacataaagaaaaatagaaaatagaaaagttaactggaagttatcataactagaaatgtgatgttttcttctgtgcccctatggatcctgactcacaccttgagcttgccggccctgagccgggaccaggagctgtaagtaattgcatctctgcttcccaccagggcaatgggaagagcttcatgttcagaaaacttggctccaagccccagttctgctaactcacttgcagcatgctgtgggcacatctcctggccacactgccccacttctgtcaggtctgcatgaatgtcactttaagaccaccctatgtaaattagcatcccactgttaccgccccttcacttaccctgcttcatatatcttaaaagtgcgtagtgctactgacgtgtatatatagataaaagtttattcataggtttgttgttatacatgtttgttagttatctttactcgtgtatgctccatgagagcaaggattatcttttgttctctgctgtgtgtgtggtacatagtaggagctcagtatatatttgttgattgaatgaattaacttttgttttatataacccaatgctacttagtaaacttttgtaatggaggagaaatgaaaaagactttaatgcttgaaaggaggatttggaggctagaggtagaatcattttgaggaatatctgctttgtatagccgacaccattgctgtttttgtttttttgtttgtttgttttgagatggagtctcacttactctgtcacccaggctggagtgcagtggcataatctcagctcactgcgacttccacctcccaggttcaagtaattctcgtgcctcagcctcctgagtagctgtgattataggcacacaccacctcgcctgactaattttttttgtatttttagtagagacagggtttcaccatgttggccaggctggtctcaaactcctgacttcaagtgatccaccctccttggcctcccaaagtgctgggattacaggcgtgagccactgtgccctgcccccattgttgtttttacccatgtgaaaacaagtactggggaccaggagctataaataattggatctctgctgacaaccaggcactgttcatggatgggtgggtggatggatggatggatggatggatggatggatggatggatgaataaatagatagaatttaatcttcacaataacccattgagattaagtttcattgtctccatttcacagattaaaaaacaaaacaaaaatgcaaaaccttgaggcccagaaactcaagtgtatctaattccaaagtacctaaaaccatgactaaacagaatgcaggtacccagtgagtgtctgtggaatgaacgaaatcctagcttgttacactcttagaacttctcgagcttttccaccaagtagcttttgtggaagaagatggtgagtgtgtgcccaggagagtcgaagggcatcgcctgtagcagtccacctcaagccagagttgtgtttttttaacatctggctttttattttaaaaatccatgtgaatttctgtattatccttcatatggtgaaacaaactcctcctgtttgttttacaggaaaaatgatgcttttgatcatttggtcacttatgttccataactttaaaaaaaaaaaatgtcaatgaaagctgctgctctgcatgtactgcgggagtggcatgcttctggcatgaattctgtgcacctacgagctgcccagcctggtgtgcagtgaccacagtggaggctgctgtggggcctggtctcttccatgcccctcagtgggatcttgtgccattcgccccctgtgcaaacacagcttgtccagaggaagcgggacattcacctccaagccccagccatctgttgtttcaggcctggatgagggcttcatctgggtgaatgggccttcagcaaacagtgcctcgcctggtcccctgataaggggtttacctctccagcagattttatagctctgcccttcatccataatcagagcgtgggtggggagagacagagagtatgaaatatccctgaagctattggaatagcctttatggtttgttgtatataaacctgtgttctggtgtggtatgtgaaacggaccactgagactcagcccacaagactttgatgtcacatagctaagggccccttttctggttcatgtttcagtgactgggtttctgagcatcttctctaatataggggtccagactccaggatttccattgactcgcgataaggtttcttcattctttgtgtctttgctttcctcttcctggaaactgagttcaggcatgtccagagtcatgtgtggtttaaaactgaaaaggctcatagagaccatccagcccttgcatttctcagatggggaactgaggcccagagacagaaagggagggtgtgccccgttgtgctctgtcagtctgcaacctctcagcccgggtctgtggagttggtgccctgggtgtctgtccctgtcaggagacagctgaggctttgttcagcatttcttatctggttaatccccaccctgtgggtatgtcatatagccaggacccaaagacaggaagagatgaggagaatgaggatgtacaagtcccaaaacaggatgacaccattacctgggcagtgtggcttatgctttatgtgaaagactctgttggtccatgctcagactcagcccagcctactccatggccaggcccagaccttgactggcaactcacctcccagccctctgaaatccaccgtggggtaggctcagagcagactcacccttacccaagaaaagaactccattcaggtctctgcccatatgtcacctcttccaagaggccttccatgacaccctgtcttaaatagcagtcctcatcacttgccgtctccacgctctgcttaattcttcatttattaccacctttcctgtatttgtgtgttcattttttcttttccttttctagaatatatgttccctgagagccaggtccgagtctgttttgtccctagcacctagaagagtacctggcatgttctctgtgagcggggattagagagagagtggaacttggggaacaactgggagggactaaaagaactgggaaagtgggagggacgtggtcaaggaagagaatgagcacccttttctgaaccacttaaataaatctgaatgcagactgtgtttgaaaagagctgcttcaaggggctcatctgtgattccttgaaaaatcaccaggcttggtactaggcactggcacctgaagtcaggggtttttgattccctggcagtccaacctgtatttcccaagggccctctactcctctgaggctcagtattctctccacctggcaggatagggcccttggcaagatggagcctggtcccaggagaaggtgcacctctgtgacgatgtcgtccctgtggccacctgtcagtgcttttcccatctggttggcagatcagagagagaaagagaatgtgggggctggaggaggggggcccagaccatctgatccattcccatttattgcagatgggcaagtgggactgatgcctagagagggtaaaggacctacctaaggaaacacagcaaggcgttgacggatgtctgctttaaaaaaaaaaatgtttcctttactattgctcatcttttgatgcatcctccctcctgcagcctctcctacaaaaataaaaaaaattccacaaaagcttagcaagggcttcctaatgcttgctgtaacataattgaccctcttgagcctcgtagctctgagaagttcatggatcttcagaaatgcgcccagtaagacgaatagtgtttctgtctagagagagtggctctaatgagtcaggcatttcccaggttcatatcctttggaattcggttctgtgagctttaaacttgtgttctatacctcccctcagaagagttgtaaggtcaagcaagtgtagaaaatgctgcctgctacaaaaactcttggagagacacaatggactttagcatattaaagcctctgagaagttctataattaacaaaaatccaacagctctttttgtgtaattcagtttcccacacttgtttgacctcagaactctttttgcatgaaaaactattggcctctcacagagctggtcttcctccaaccacagacccaacagaccactcacacaagggagtactcagcacttacttttcattttatacagttatggctttttgttatttcagtataaaatacgttggaaaaaaaacatgacatataataggcctcctcaaaaggggttggggtgaagcgccctccaactaactttttacttcttataaccagaaagacaaaagacagcttcacgaagacatctcttcttctttatatccttgtgattctatttttattgctctaagagcctataggccatttccattttgtgagtacaataaaacatgccccttactcaaatggctttcaagacaggccggaaggacttcaccataaggaaaatgcatctatgacactcctgtagcttgggaggtggagtatcattgcactgaatggatttgaatcctgccatcaccaggcatcattacttaatctagctgtgtctgttttctcatctgtaaaatggagtgctcatagtacctggctaaagttgttttgaggattatatgagatctgtgtttaacatttagaatggggtccgatacaaagccgatacttacctgttactgctattatcatagaatgagagctctgtgtaggcagtgactttgttttgttcactatttacatgccccagtgtctagaacagggattagcacatagtaggtgcttagtaaagtttggttggatgaataagtgaatgaaaaaatgaatggaaggtcttctatgtatggagagcaatacacgtttctgagagtcagattctagcagagaaggcaccagattaaaagtgagctgcttgctgtaggccaaggcttttgcttcctctgccgtgtcctctctgtgtatgaatgagaagccagcacccataaggatgcaagtcatggtgtggaactcagaagcagagcgtgaggtgatttcctggaaggtggcagtgtcatctgaatgtttcaggcctcaagaatccaagcttgtggatttctattcctggttactacaggcaggtctgtgtctgcccagccagagagttgccaccatttacccttggagcctcccagcgaagatgctgcccatggagctgcttttgaagggggagtgcttctagctgtctgaggcaggctgagggccccttggccaccttgacactcttgttccccaaaggctccatgcccccttgtctgtgggttggcaccacataatgacatgttaacccttggcctgctgatgttgattttaccttctcttgagggaatataaccaaggcactggaccaaaataaacagcccagatgctgtgctgacccggctctgctgggaagcatggtattgatttgcccccagcctctctaccttcagtaacctcatctctgcctgaggctcctaagctgggaggttgattcacttctttccttggcagtgtattcacccaaacacccacacccactttgtttatattcctaaagaagccagcattagctatttttaaggactgtgagtggccctaggtgcccaaccctcctggtctggctgtaggcaggaggtgacaccccaaggagagtctacctgtctcaacctctctggtgggaaaacccagtagccaccagcctagggaatgccaaaggcctaagcaaacacttgtgcagccagccagcctcatggccttggccctctggccagaatgcccttaggctgagggtactcatggttggtggggtggggcagttcagactgatctccaaagaggggattgacagacatgctcggggcctgcagctgaatactgtctttagggaagtgcagctggaaagagggtttagctgtgattcagccaggcctgcagttcctcagccttgcccatgaggctctaatagccagtttaaggagagctcactgaaagtctgcatgaacccatgaactgtttcacagctgacccagcttcccagttctgcagcttccattttcccctgtccctgggtggtttgcttctcaaatccagggagtcttctccgagggtacaggagtttttgagggagtgtggttcagaatgggaccagccccttcccctctggttcccccccaactcctattccagtgaccacattgggcatgcagggggccctttccaactcaaagatcctccaagagaaaacattctagccttaaaaattgaggaaaacagtctacctctgtccccctggtcatctgcttgagccagagaatctgtttcactttgggggtgggcagtgtgtggccatcgggagctacactggctatttgcttgccccagtggctagttaatgttcagccaccagctgcctgtgaaaatgctgtttatgtctttcttaccccacagcccctcggggagtttaaataaggtgctgcggcacttgagttctgcaaaagacacctattcgctgaccagacaaagatgcttagccacaactcacaactctcagggtgcagttcgaagaggaggaagcagcatggcatataaagctcatgctcccttgaaggctggtgattgagacaagttatgtcttctagcatttgactccctcaaagagattgcaggacttccctctgattgcaggtggctcaatccactcagatcacctagaaacttgatagagatttagaatcttaaagaagacagaagcttagacagagcatgtagcccagcccatcaacagatgaagaagttgaatcctgcagggactacaaggaggtaggtagagctagcagaactgaaggccggcgggacactacgcagtccaggcaaggggctctgctgctgcagcctgtgcctgtctaccatttccctttggctcctggcacctgcctggtcagttctcctcgacatcccctgagagcacaaccagtctgacaattgttcctaaaggcagtgctcctaggggaatgcctgctgagagggaggctttcatttaacatgggacttgggtggaaatgcggagtgtgtcctatcctcccaggcctccctggataatctgtcaggactgtcctgctgtgcagccaacagcctctgtgtccttactctgctgggatcacccagccctgcctgggagctaagagagtggcccagccttgtaggtagccacttgccctttggattaagatgaatatgcatgattctggcaggagataagatatttatcttatttatttgacatgcatggatttcttggctctgtgtgaagtaggaagggaaatggagtggtggaagttggtagatgggcattttatgtacacgacttggacctttatcatttgaaattttcacaaagggggatcaaggctctcccgttttcactgagatggtgattctttgagtcatagcctattttgacttggagaagctgggtaccaggtctccactcaagttcaggcagtcattcttggtttcacttctcaggtaaagaggcatgttctcccattattgcttctgagatctttcctaaagatgatgaactggttgacctttgctgacaagtccacattagtctgctgtggggagaagaagtgagtggtgtgggcaattctggctgaagtttaaattgcagaattgaaccttagatatgagtttcatagtagatgtgttggagaaaagagagcctgggttaactgtatcttttctagtcccttcacaaaacacaggcacgcacacacatacagaaggagagagagacagagaaagagatcattcagtttgaatccatagaattgaccctgggaggtagattagaagagagaaagggaaagtggaggtggctttcttaggagctttagacatttccaggtatgacttccagataggtctggacctcagtgttccaggccaacccagtcaagttcatattggccaacatcagagagacgaagtaccagtcttaggtcaccctgcaaaaaaacctgactcccagtccagtgcccttttcactctactatgttacttctttcctagagtgacctttccaagctagtccatggctcaccagagcaaattggtctcgtggcattatagttacaccagcgctttgtttccaaacgcagtgatcctctgtaatcgccaaatacctatggctttgagggacttttgaacacaaaggcagactcaccaagagaaaacaaagtctcatcaccatttaaagttttcagattctgaatacattctgaaaatggcagttagaagtgctttagccaagggccgtgtcccaggaacgtgtaggattgtgcatttggatatctgtgtctagcttcatcacttattgctgggtgatcctggataagtttacttaatttatctgtgcctcagtagcctcatctgtaagagtagaattataatagaacttaggtcataaaatttttgtgaggattaagtggaatgctgtacatgaagtacttagcacattgcttagcacaaaatgagtactcaaaaatatttactatcagtattttattcttttgttttcaggtaagtctctcttataattgtacatgctatcaaccagtgcaaattaatatggtatcaagaatatgaagaatcaaaagactaaagagtaatgacattagctggtggggtttatgcagtcattcgttaaacagatatttgttaagcatcatctatgtacctgacatggagctgaatattggagctgagtaagatagatgtgatcttaccttcatgaacccctcctcttgtaggggagacagacatttaatgagtaactacggctgtgcagagcaatgccacaggatgcctgtatctgaaagagaaaggagaggaaggagagaggagaaaccatgcgttctggtggccaccccactgctgcaaccagaagaacacagccatctccctggaaatcattctgataaatttaactctaggggaaaaacacagccggtccatttccaaactggaattctccccccatgtgtttttgggaagcacagatgccttggcgttttccctctaacaataacagagattgttcacaattatgaatggttttggttgacttcagctccaacaaaaccatgaatcatttcataacttctgaaattgcaaagaaataacaaacactctggctccagaaaaaaaaaatggacacattatgaagcacaaagtcgtctaaatgaaaatgtgaattcttttttgtttgtttagcagctgcacgttgcaaggccagctggcaacggataaaagacccaagttagtgtctaggttcctggggtaccacttgtatagtctcatctgtgggatccgtaaccagctatgatataaacttcgttctccatctttctcaaaactttgggccagcagcattatttcatacattttacaatattctgagaaagcgagagtgaaaggaggtgcttgggctgaggctcgtgacagagggtctccatcatgggtcccatcacagatccccccccgcccgccccacacacatttgtgggacgactttttttcagcaggcctgctgcatcctcctgatatctagccacaagaggaggttttcaaaacgtgggaccaagaggatcaggcttcccccagtctgacagcctctgaggtaccaacaaggcctggcattggagcaaggttggctactcctcttctctcttaatccagaaaactgcatcctttcctaaaggctggagacacacagctatccttgattgcagtccagtcttgcctgtgcacgtggccagaggcacagcgggttctaacaccttggggctgagaccagattggagagtgggggacaagcacatgaccacagcaccacagtcacagagtcttcctccccaccttgttgactttcttttttcatgttaataatgtcaacatagtggtggccatcccactgctgcaagaacatttgttggaaagatacttcttttggaaaacaggctcaggggagcaattgttccccctcaagtctgcctgcactcctgatctctttccacgctgcagggtacacagcagacagcagtagactcaggcccattggcatagcatgtgcttcccacacacgcattttttaaagtaataattttgttacacaattaatgcttatttctcatagataatgtaggatatacagactttaaaatggaagaaaataaatatagcctatatttctattactcagagcgaatcataatttgcgtttgggtatatatgtttctagacttctttcaatgcatgtgtatgtgtttttaaacaaaagctagtatcaaactgaacacataattttattggccctctttactctcactgtacactctgaacattttcccatatctacatatatgattgcatatcactttatgccctgcagacatctctgtaaatctctggaagatttttccttttgtgtccttctccctaccatcagagatggagacaatagaaaatacacttcagtgtcacatcacagactcacatcttgagcactgatgtaagttttgcactagcccatcacaggcactctgcctgagacccttcctgctttagctgtgattatgagtgcccagttcatcagccaattcattgccaaggtagagcctagctctgtaaaatgcccacaagctttggcagcatgaaaaccatgcaaagttgcattgatgctactcacaagccccaaataggtggtctcaaaagagaaaaaagacttatgttttaataaaactccctttaataattaggtgctttaataaaaggccacttgggtcactgtctgcctcctcagcctagacttcctgcagttggaaaaaaccttccaaggacagagagggttctagggacatactggacaggccctgttcccagccgctgagcccacagggactgacaaggcaccaccccataagaatgtctgtacccttttggagcctacatctgtaggtgctgaggcatcacattcttcaggttctaatgaagaattattgcagtgatgagttgtagaaataatcatttaatgtttattattctgaggaaaatttaagaatttctgtattcagagcagattgacaaatatggcaaccacttcacataatccacacgctagatccttataaatgtcattgttatcactggagcctcagctatggttgtctttcccaagctggatgaataggactgccagttattcactaaagatagagacagcacatggcttctcttaggcctggttgctgggcagaggctatagcattgccttggggtagggggtgcaggtctcagcaactatccttgagcccttcaacagggagtcctgtctccacaaagatgtttataggtcaggcttttgagtcagaagaacaacttgcagttgttttctggggccacaggagttgattgggtaggtggtctggaaaatgaagaagcaggaggcttcacataacacaccctggatttagggtggggacacagccagccccagtgtaatcttacaatggagatgggatctcttcctcaggtgtgtctgaaagccacctcagcagcctccagggaagtgtcctctcattggtctcagctcagtgtgtggagggctcgggagtggttagaggcaggctcatgcagacaccattccctggaatgtgcttgtctgtatggtcatggaaggattttttctgcctcctcacatccaaattcagcttagtagactgttattgggcacccgtgctggtgccttgcctctggtgtctggctggggaggcagtgtgaacaccagggacttcacatcccagggtgatagcagttttcaaccactttcctagaactgcttggtttttgaaccatggtgctgtttaatgcttttattgagtggtgggtcccatatgtgtatacatttgagcatgtcagtttgacagcatttcttctcttgtcttgaacttttatctgagcctcatatcagaatcgaatttttcccatttctctcaacctttgccaagtcctccatgtaatgcctacacaggacctgaagaggaactccatggtctgatttgggtttaattggttggtcttagatttcccctccctctccaggctcagggtgcctcatagctgggcacttagggtgacaagcttatgagctatagagcaggctggggtgtttatcctcgtgcacagtcacgaggagaaggatgcttataaaactagaacaggatgagactctgtgggatatggtttgatttgcctcagctcaggaagcccaccccgatggagaaggagaaggcaggtagaagccaagggaatgacagtcaaggccaggatgcctccacagggaagagtgctccttccaggaggtggcatcagcaccgtccagctctctctagggctccgtactctctgtgtacatggtggcccaggctttacttcctgctttttggagtgggacctcgagaaccaagcagtcctgccactgcagcccaagcggagcatgcagttctttgccacaggccttacagcgctctgacgctgctcccatggaacttttcccaaccaattcagagcactttgagggccacagtgatgctgggagcctgtgttgtgagtcccactgctatccagggaaggccagtgtgaatgagtagcagtgctggggagtaaagcatcacttctcaagccctgtcctcaggctcatgtgcagcactagcgatgcagcactgactgcacacagcatgccactcagtcactgaggaggggaagtgagccccttttagttctcttccagtgcttcccatcgagttgaggagagtccattgggcactagaacagcttaatatccctctaaagcttgccaatcttttgaaacaaatagtctgttataggtttgtttgcattgtatttgtttccatggttatctcctatttaaagcaggtgataccatttaaggcaacaatgtaaaatttcctttttaaataataacaaataataataatatttgtttgcagtgtatagaattaaactaccaagcaaatgaagcataatggtataggctatggccaaaaatcatgagggtaatggagtgactcaagtttgagaaatgctgaaccagacctgctgctttccttatcctgcagtccagtgtcccttcgtgacaaggcatttgagaaggtattttgattgagtgtatgtttataccactcacaaggaggtcccagttacgagcctgtgggagctgggcatgagcagaagctgtgctgcttgctggcagaaactggcctgagctgcaatgggaagctacactgggaagatgaaaagccctggcctcagaagccctgtacctggaaaagggctaaatcccagggtggtcactgctagttagggggtgctgtgtcattcattcatcccactctcctgccagcccaggacagtctctggggcacagcagtgatagcagaaatgctaatagcaaacatgcattggactctcactgcattctggcacttcacctgagtcatttacttctcataatgctgaaaggtaacagtggtagtggtagtaataaggggaggagaagaaggaagatgaaaaaaatgttaatatttattgaatattcacccccaaatcatttatagattgaacataatccctatcaaaatcccaggtgccttctttgtagaaattgacaagctgattctaaaattcaaatggaatttcaagagattcagaatagccaaaacaatcctgaaagagaagaataaggtaggactcacacctcccaatttcaaaacttgctacaaagcaatgataatcagtacaacatggtactagcaaaagaataggcatctagatcaatggagtagaattgagagtccaggaataaacttatacatctatgaccaactgatctttgacaaggatgtcaagatcattcagtgaggaaagaatagtgttttcaacaaatggtattgggacaactggatagccacagggaaaagaataaatttggatccttatctcacaccatatacaaaaattaattcaaaatggatcaaagacttaaacaaaagaacaaaaactaaaacataggggtaaatcttcatgactttggcaaagcattcttaaataaaacatcataaacaacaaaagaaaaacaatagataaattagactttatcaaaatttaaaaattgtatgctttagagcagtggtccccaacccctgggccacagactggtgggaacccaccaggccatacagcaggaagtgagtagcaggtgagtgagcaaagcttcatctgtatttacagccgctccctatcgctcacattactgcctcagctctgcctcctgttagatcagaaggagcattagattcttataggaatgggaacgctgttgtgaactgtacatgcaagggatctaggttgcatgcttcttataagaatctaatgcctgatgatctgtcactgtctcccatcacccctagacgggaccatctagttgcaggaaaacaagctcagggctcccactgattctacattatggtgagttatataattatttcattatatatagcaatgtaataataatagaaataaagtacacaataaatgtaatgtacttgagtcatcctgaaaccactccatcccccacaaccccagtccatggaaaattgtctcccatgaaattggcccctggttccaaaaaggttggggactgctgctttagaggatattgtcagtaaagtacaaagacaacccacagagtgggaaaaaatatttgcaactcatatgtctgatcagggatttgtgcccaaaatatataaagaactcttacaactcaataataaaaaaacaacctaacttaaaaatgggcaaaggatctgaatacacacgcctccaaagacaatatacaaatgaccaatagcacatgaaaagatgcttgacgttattggccatcagggaaatggatggagaaaaaaagtagattactggttgccaaggaattggagggagcccaggagggtagggggtgacagctagaggctacagggttattttttttttagcagatatatgttccagaattgactatagtgatggttgtacatatctgtgactgtaccaaaacaaactaaattgtatactctaaataggcaaattatatgatgtgtgaattttatctcagtgaagctgttgaaaacatttattgagctccaggcacagttcttaagcattttacgtgcattaactcatttgcggtcacccagtgaggtaggccctgttatacaaatgtcaccattttgcagctgaggaaactgaggcagagttgcccagggcactattaatatctccttctagtgcataaggaaaatgaggcacagagtttagagtttgtgttctgtctgtggtcacacagctggtacagcggaggcagaatcacagtgtgatcccagaccccactcttggccactcgccatgctatactacaggcaaagcaaagggttcctgcccatggggagctgtaatctacttgagtgtaggcacgtaaatgggaaagaggttgagaaactgtcaggatgaccacctactaattcgctctgagacttcagttaaggcacagaattcctgggcctcagtttcttcctcttttaaaccaagtcttaggctggataaaagagggccccatcctggggttcatgaaagtagtaatgctggtctatggataacacttagcataaaaaaaaaaaaaacctaacattatatttgcattcaggcctggagaccatagagcatctttgctcttggctgaaattacgtcccaccagggtagtaaccctggttacctccagctgatgagaagcttcgattagcagtcacgtatctgactctgcttgacaagaataagaaactggatccctcattgcttgttctgggaccacttgctggggaaggccaccctcaggtctaggggcttccgctgcgattctctaaggtcatttgaccccctgggacttgccctcccttggactccctggctttcctctagtctctagggtcccagctattttttccaccacacccagggttccctgtggcaggcccaagctaaggtggatgtgcagagtgtgggctggccagtatagccaagctgggcaaatgcacgtgctgtcaggagcatggacagagctcccggtgctcagagtccaccaccgcttctgctcttcctacaggcagaaggcaaaggcctgtttcccactgaatagcaccttctccagtcatgcctggggagctctgaaaataaaccagattgggaatagtcaggatgtgggctactgatggcccctcgggtctatccagtgcattttctctggcactaattttcaaagaaagtttcactaaaacattttccactgggcaaaatcatgcctttagaatcagcctacactagagtcttaggatagctgagccaggagaaagcactagacaacatttatttattttatagataaaaaaaaaaactctgttaaagatgcttcatctacccttgttgttccagggagatgtggcctctgctaggctgttgcggctgagctgatgatcagggcaatttatccattcttagaaatctggtgagccctgcttcggctctgtgcaactgctaaattcagtttgtatggatttggcttggaatcacggccctgacgttccatttgattcagcttggctggggtaacgctcaggtcttttgtagaagagttcacaacactggccagttaaagggtggtgtgccctcaggcagtcagaaaatcttgtccactgactcattcattaacccacaaacagaacaggcattgccctaagtatttgggggtatgaaagaagctgatgtggatgtgttcctgtcccagaaggagctgatggttgtatctatgaaggtaagcatttttgtagatacgagcaccagccaccctaagcaaaggcagagaatgcttaggccagacagagggctagggcacttgaatagaaagagagcaattcttgggtacaagaagcccaagggaagttttctggaagaggtggcatttgagctggcccctatagaatcaataagattgggaaactgatatggtgtactttctctgtcaaaacatggcccatggagaacaaaaaacatagcaattgagacacagtaccaagtctggagggtagacttataaaaattgtgaaaagtgttgggaaaggaaaatgcaggccttttaggagagactaatgggaggtttataattcagattgggtgtgtaggggggtaaggggcaccaggattcaaactcggatcttaatgtttccagagcccacacccataattactgccctgcttcctcccagctgagatctctgcagggcccctgggtgaatcagagacagaagtcaggcctcccaactccctgggtcagccctctttcctcacagcctacctgctgcctgagctgctgcctcagggcacatgcctgtctgcctggctgatgtttcccatcagtggctgactccacactgtgctcttggaggtgaggtcagggacagcccaagcacccagactgcttagggcagacatgcaaggctcaggccctcctgaagcagtcgttaacctttcttcaaaggtcatgttgtggaaaacccctacttcagcctcccagctgtaatcacaaagggcatcagtgagaaagccttttcctgggaatgtctgttcttggtaacatgcccaggtcacaatctggaacatcagagtcccgttcacagaaacacggatcctgttgcaggcactctggccccaccatcgcccagtcctggagggtacttctggatactggacgatcaagttcagtgtctcctggctaaaggcagctcacgtaaacttcgcagctgcagcctgagaggcacgaggacccagtgtgtccacgaaccagaggtctttgtcctctgcctagggtttcccataaggaaaagctcacacggcaccgctgtccccacagcgccctgctgtggagcttgttctctgtgtgtccatgttccccgtcatgtgccctcccactccagtgatcattgctagtctgctgctgtcacttccctcctcctgtccctcttcctctctgacaaccctttcccagaatgcctctcctctcccctccctgggtgtcattctcttcaaaaaggttttttaaagagcgaatgtttaatttgtgtttgttgactaaatgaattaatcaagtagggctcttcattatgtaatgccttgtacatgcaaaagattatatgacatcaatagaaggtattaagaataaataaaatgcccactttaccaagttaaggcccctatctatgtggccctctgccagagtaacagcttccttaagtggcccttttttcctcttctccccgcagtctaatccactgtccacctgactgctggggccatctttgcccgcctcagctcccctccgttgctgtcaccagctacccaggtcagcatggcccgtcagcagagcacatgggctggcgccggccatccaggcagaacagaactgcgctagcctgtgccctgtaccctgctgtctccctgtcttggggtgcacagtttcctttacctggaataaccccacccacatgtcccatgtctctgcctgtcacacccacctttccttctaggccgcaaaatgtcatggttttcccaaagctgtacccaatttctccactcagctgtacttcctccttctctgagcccctttaaaacataggtggttttgcttttctcttgcagtgtatctgacattttgctaccttttattagggtgaggtttttttttttttttttttttcatttctaatctcacatactggattataagtgtcttgtggacagccacatgtctttgaatttgtagggcctagtagagcatcttgtgcatacataataggtcctcaacaaataattggattagaatggattgaacagtcctcccctaaagctcacctcacatctccttccctgaaatcctataaaaataagcacttgtctcccgagggagaagggcttcttggagcaggaatgtggttgatgcttaataaataatagctggatgaacaaatatttgcaaacatcctgcctaagatagaggattggactcagtgcttcctggggcagaaagttgtttaacctctatcacttcttgataaataatccctacattaggatatttggaattgccaactaggtatcatgtaaaggcaaaacaattatgatactgaatgtgcattctcacacacattggttgaggattacagctctcagaaggttgttcataaaggcatgatgtctctctgtaggtctctttggggacaggggattttgagggagattctgttggcccagtctcaactgttagtgcctttaagaaaacccaaactgattttctttagacaacactaagaaaagcatgcacaattctttgaaacaatttttaacagtaaaacatatttataccttttaattgtgctgtcttaacatttagagaaattaatatgcaaaaactttcaccactcttaactctcgtttctgttttccagtgctaccttccagtctttgtccatgtgtatgaaagaagctttcatttctgccagaaatgaaatcaaacttctgatgttttcctgttataaacatcaaatctaacaggcaaactttgtgaacacctactgtgtccaaagccatgtactgagaatggcgggagatacaaaaagagtttgttcactacacaagtatatactaaatgcttgccctgtgcctagagctgttctggtccatgataacagctgtgggtgagacaggtcctcagcttccaggatggaaagagaggcaccacacagaaaaataatatgtcaggggcagataggctatgaagaaaaataaacagggagggacttagagggggccattgttttatgagagtggtcagggacattctctccaagataacatttaagcagcctctgaaggaagtgtggaggtgagggaagagtgttctaggcagaagaaacagcaagtgcaaaggccctgaggtgggagtggtttttaagaaacagaagcctctatggcgggagggataggttggggaaatatgaagtcaagagagggagccagaggactgggctactttagaggctgcagaaggacttggacttttattccaggtgtgatgggagcccatgggaagtgttgatctcactgtggagaacagcccagagacaggaatagatgcagggagatcattaaggggctgctgaagtttctcaggagagaggctgtggtggcctatataaggtgctctactaggccgcacaaattcagagacatggggctgtccacaagaaactacggtggtagtgatttagggaggtagcagagcaatcaggtcctggatgtgttttgaaagtaaagccaacagatttcctttcatattgaatgtaggtgtgagagaaagagaggagtcaaggttgaatccaaggtttttggcctgagtaactgataaaatggaggtgatggtctctgagatacatggaatgggggggaacaagtttgggcagtgaagtcaggagttttgtttggattctcgaagctgcatatggctcctccgaagttcatggcaggtgctgctacgacaccgtttccttcagagccccagcatggcctcaccatctcaacacagtgctgcagaacccaatctagaatgaaaaccatcgcactttcctggcattgacagacaatccaggcatatccactggggaggggagaggagtgctggggaggaggctgttctgtggacaactggcatgatcagggaaagcaccaagggggagaggagctggaacagagcttttgtgtcaaggagccactggctgcaagtaacagaaaacccaattcagaagggcttaaaccataccggaaattatgaacacatatatcaagaagtctggaaattaagcaggcccacggttgcccaatgaagctatcagggacccaagtcttttctctctattcattgtgcctgcctcagcacaccagctggctcctccctgcagcagctccaggcattatggtttcaccacctaaatcaagggaaatgacagggtcgagcctctccctattttagaagccctgctgggagactggcccttacgctggacagatttagccctcattgcacagatttgggtcccatgtctcttcttaaaccaatcactggttagggcagtgggtttacatgatgtgcttctgccaatcaagaggagatagggacaccaggacacagctcagacttggccaacagggaagagagagaacaatggtggatggcttggccaccaacagtgtctgctccagccccaaaccatcaggaagaattggtactgagaagtaagaagggagggcgttctaggtggggagaaaagcatgagcagaggcacagaagcatgaagatacaaggtatgtccctcagacaagttggcggggttgatgagttgtatacagtgtggcatggaatgaaggccagaaagaaaccgtaattgctaaccttatttggggatcttcttggcttaccaggggtcttcagaccagtacttaaaaaccacagatctagaaggccaaccatctcaaggaaggaattcttgaagaactgtaagccttggccaattagactagataaagccactgttaatattcctctgagcacttccactttgggggaagatggaatgtcctcagcttagtccctgtgctgatgccaggtttagttgggtggctcttgggtagaaaaaagagcatgcaagacagagctttcctttggaaaacatagccagaagctgatcctgagtatcagtcatcctgctttcattgagattgcgtatcaaaccctttcaggtacaaatggcagaaatcctgcccaatgacttaaaaaataagcttagccacctctctcactgaaaagtctggctcctggggctgtaaggatgttatcaggacctagtggctcctctctaggctctgctttcctccatgttaacttcactctcaggtggattcacccctcagcctcagctccaaatccccatgcaaagtgtttctttactggatatcccaggaagagtcttaatgcttctcactgattctgattgacttatgttccatccctgaaccaaccattgtggttttggggaatggaatatgttgacttagtccccaccttaatgacatttggccaagagctggggagaagtggctcttcgaacacttgatgttggcaaagaggtgaaagaatgaatataaggtggccccaagccacaaatgtctaatctatgattttacccccgagtctaagatctcacatttttcacttcagcatcagtttgtgtgttttacagtctacaacaggctatcataggcatcccacttaatcctaataacacccctataaaggaggctgggtggcaattatcctatttatagatgaggagactgagggttagagaaattcagttatttgtccaggaccatctcgatcgaaattggcaagtctggcctttgaacctgggacttgtaaccctcttccagtgaagttgcccattacactgatgacttacaatgcatctgcctgcatattcgaggagagaagttcttaaaacttctacaagtgaaatcaagttcacttctgtaagtgaaatcaagttgaagagtcagctcaaggagtgcaatatgtaaatggtaaaataaacaacatcattaagctcaagggcatgttttaataacagttaaataacttttacaaaatagcaaatattttcccattctgctgaaatgggtcttaggaaaaaggattgtaatatagaaccccaggtggtcaagtgcacattggattttcctaacagcctcctttataaagaagagcttgcctgtggctttgtttccttactctccagcctcaccttcctccccttgcctatgctcaaaccattgcccactaatagttctgcagatcccaggatagaagttaatctgcttggaaggttggtccacttagcttttccccacaggtgtcattttggtacctggtgagagggtctgcctgtctccctctcactctgcactccagcaccagtcagcgaggctgccatcttccctgatcaagagctggctccagagtgaactgtaaagcacccctgttagatttcctggcatttgtaaggaccttttctggggcccagacagaaccagaggcctccagccagaggcaccaatcctctgaggccctggtgcatgggcaacaaatgagactttttgcctccagaaggagctataagcagaaattataggaagtataataaatcatcctcccgccctcaaagtagggccacaccaaggaaggtagagggaattctgtatcaaatgagctgatcaggccaaaatgtgtgtttacttctcattgagaacatatctgcaggtacatggtaaactacaagtactatactgtgttcctcttggttattagtctctggatggcacagccaattgcagtacaaggtgggatggcccctgtgaacccaagtcttctgactccaagtccccaaggctggccccctagatgccaggctgctggacaggaccctcagacaaggctagggaaagcagtaagtgctgtgcttcctgggccagcctcagcagggcactgggttgcaaggagagcagttcagatgaggtgggcactctagtgccttgctcagagcacaagcttccaagtaacacagaagctcagttctgccactcaccacctgagtgaccttgagcaagcgagttgatctctcttggcctgcatttcctcctctgaggaatcttctaatagtacctttcttggagagtcgtgaggatgaaatggggaggtgcacacaaaccacccagcacgacgtctggcacagggtatttgcttgatactttcgcatagtgaggctgacataggaagaacttctcatcacagctcatccacacccccacatcaggaatgctcaagtagacccttctcccctcccaaccttcctcctggccccggccccatccagctgttccttcttgtgggcagtggggtgggccctgtcttcagtgcagacatgccctgttgcccttgagtgcattggcctgtcccccccaccaaccccaacagctcacagggcctcttggtatgggaagtgcaagtcaccctgaggaggtgccgtccatgctggagccagattctgaggctgcaatggaactttgggctgatgcactcacattgcttgccttctgccaagagttctgctggggagctgccctcggctaacctctgagtgtctgactagatagcagcagcggcagcagcagccatctctggagccaagcatttgagcagagaacagctgctcctggtcctgggccccctcttgcctggcccaggttccagtcagctctgcctaaaagactccccagggcagcctggctctggtgccaggacccttcaccctcctcgttcctccatctcacccgcaacagtgtgtgactgatcgactcctcctgccactttgtcttatcacgaagattagcagggaggaagctgggatgtggagtcagaagacctgggttggagccccagcccggctacttgctggcctgtgaccttgagcaggtcccatcctttccacacttctggaagatgggagaagagaatctttattctttcttcttaattgggcaagtgtgattaattgtaatgcaatgcagagttgcctgatgagaagcttttaaagcaagccagaggtgtgtttgagtgaaagatgaaaatattctttacagccctgtggggcgggtgttggtcactcttcatctgtttggtgttggtaggtgaaagcaggccagctcactgggccactcttcagcctccatgctgagccctgttacctactgggtccctctcaagttcagtccctgtgggaggtatgcacagacatgtgtagccaggatttgacccgatgggccatgcactttgccatcacatggaagcagagtgggggacatgtggcagcttgtgggatgaaggggccagacctgggccctgccttctccccagcctggggtagcagggagatgccaactcttcctgggattgagcttctacttaaaaaacaaacaaaaaaaagtgttgaaattctaattaaaagttgtattaagttccagtgtacacggggcattttttataatgttaaatgttcccatttaagaacatatgccttttcttcaaatctggttttatgcccttccataaaatttttttttattaaacatacattgtttgtttggggaagataaaattttgtttaattaaaaaaataaacatatcttgtgaaatttattaagtttatatctgtgatcaagttttgtaagtgattcaggtcccaacaaatgatctattccagattcaaggaatgcagggccctatatatttctagtaattcaaattatattttttattttctctgttatcttaatttttgcctatatgtctatttttgaaatagacatctttgaaatttcacactaaaattttatttattccatttctaataatggatgcttcatatatttagcttctgtgtttaatgcattaaagtttctgatggtcattaatgtcttcataaaataagtgttccttttatcatcacaaacatctgtatcctctgcagcatttttttaaactaaaattctcccttatctaattaattttgacacttctccctccttttgtttgcacttgcctagtatctgcttgcctatgcatttattttcaacatttctgtatacctttattttaatcagttttcttataaacagcatgcacctggagcttggtttttgttttaatttcttaacccaatctggcatcttctgtttttaatgagtaatctaatctgttgactgatgtactggattttatttcttccatctacagtatgtttataatttctttctgtcgtattttgtttcccttgcttgtgctggtttaatgtagttgcttcaaatttcatcttttccccatattctctatgttcccatagagaacacagggaaagttctctacttttccctttcattaaaggttacattctttttcccttaattcataattaaacacatattgctttaatgttatttgaacacaagataacatgaaataactgttcctccctccaagatgttccattctctccctgctcttccctgcttcagtgggatgagacgttaaaattgtttccctgtccctacttaagatgagaccttggaacacttttcctcccatcctcttcaactccttgattctgttaggaacatttaatatttttagctttgagctgttggtggaatttcccttgtagtatgtcccttctattttcagagtccttctttagcagttccattcccagaacatctaccattctccatttagatttaggagaaaagggaggggcaggtgtgtggcaatcttccttactcctcacggtttcctgaccagttcattttccccaggtcaaggaaaaatgttctgccacatttgttgtttgttgctttaagtattttccatagatgagatgtatgggtgataaactatgaattcttgtgtgtttcctctaaaaaatgatgggcaaactatttgaggtctttggttatcttttctgagtagtgtatacatggtattctgctctcttttagtttgtagtgtttcagatgagaagttcaatgtcagtcttactcttttttccttataggcaatatgttctttctgtctggaagcttttaagattttgtgttcatcttgaagtttagcagttgtaccaaggtaacctatgtgtatgtcttttcttgtcgtccttcctggaactgtgtgagccttttcaatctgtagagtcagttcttttttcagttcagggcaattgtcttctgtttgttatttaattattggctgtcctctctcagtttgtttttctacttctagaactcccaatatttttaagttagatccccctggatctgtcctccatgtctgttatcttttcccttataaattatatatctatatttttactgtatatttggagataggttttccattttgtcttccagaccaccaattcacatctcaacagggactcacctgcaatagttgggaagacattgttttaatatgtgagaaatcttttaagtctgccctgagttgctgtagggctcatgtgatgttctgcttgagttttcatttgtctcttggagcagctgcacttcactgggcttgtgcactgttcgttctgacagatcttcttctgccaggactttgaagcatgttgtgagtgttctttgttctttgtacctctggttatggagcccagagtggcagcagtccacagctggtgggagtggagctgtccttacccttggagccagtggtattgaggcaggtgagccaccagtctactcctgagacatctgtctcccttacttcccattcccctttggctacagggcagggggttgcagcccactggttcagccacttcttggtctgacctgggtcaatcaggcaaagccagtttctacctgcgctccattacgtgccaaattccacccacatacacacacacactagggatccactggtcttccttggccaagttctttccggcatccatggcttttgatccttgctccaaagctctctgaagctggtctctaataagggagatccccacaccagtttttcagccttgtttcccgcatgtacccccatctgcccaaaggcctcagcagttctctaatttaggattgaacagataggttagagatgataatctctttcaggttgccatgttctcaggatctgttgtcttttctcagttactgatggatcaactgagactggaggtcagtctctttctctctgtctctctctctctctctctctctctctctctctgtgtgtgtgtgtgtgtgtgtgtgtgtgtgtgtgtgtgtgtttgtctttttttctggataggctatccctatggctgcactcaggggccactaacactccccattactctttgtctagttgaatctgattagacactggactagcttccagaatcatatactccagagtgcctcaaattacaggacggacactgccagtggcccaagatgagttgcagtggtgcaaggacagtgtttgagaatgttgaatcccgtggtgggaaagttgtttgttcagttctcttttagttcttctaattatggcaaatagtctcgcgtttggcattactatgcctttgacacatctctagcactcattaaattcccttttaataaaacagagatcaaatgtcatgcccagtcttcagtaggcaacagtattttctgtggtggggaaggctgaaaggggactgggtttgggggggggaaattagaagttcagttaggagcccatttattctgccctgcctagtacatatttaagtggagatgttgagtcggcaatccatggtcttagccctggggcactccagtgtttagatattggattccttcccctttgccaaccaatgcagaaggtgcctttcctacttgttggctgaatgtctttgcatcggctagctcaggaggtttgtttcccatcactctgggccacttcttggcagccaaggccacgtgattgtcattagtgttccgtgtgtctgaccaagcagcccttaagtgcaaacatggaccgtggccaaccttccagctgtgtagagccttctggctgtgcatcttgttgggtccttgggggggtgtggtatcccccagtgaggcttcataaaaaggtggaagcaagctgaaccgttttcacaagtttgaacatggttcacactaatgattcactggacctgtcaaatttctgactacagcccgtatttattaggatgaaaaaaaaatcttccattagtttagcacttttccttcttaccaacatgcaggaaacatttattctacctgaaacgtgaggctgatgccattaactgactctgtgaaggagtcctaatgccaacagggccagcaggctggtagactgagggctgtgggcgtagactgacacctgatggggcgtgtggatcacgagagcaccagcctagcccacggcaggcagccaaactcaggcctcacctaaggaggcagaccagcatgtccgattcttcaggagaaccagaaatcagtgtccttttgtgacaattcttctgatttataaatgtttgcttaaaggaaaaaaataaaaagaaaagaaaaactcaaaactactgcaggccaaacaaaatacatctccctggcccaaatccaggctgcagatggccagtttgagacctctgctacgtgactgcaggccagccaatcactctgattcttatacttcccaccattactgtgaaacagagccactaccaggcttgctgaggtggagattatgagtggggttctgttttagctcccagctctgctgcttactggctctgagatggtggccaagtagtcagttaacctccctaagcctcagtctccttatttgtaaaatgaggataactgggttattcattcctatcatgaggacttcatgagaaaatatataaaaatgtccagcacaaagttggtgttttgtcaagaggaactgttgttactgttcagtaacacgtgaaatgtttggaaaacctgaaagggagtgttgggcatttgacagttatgggtagtggcacaccacccagagcagaaaaccccttgcccatggttctgtcatagtgaggggcaacagggcctgatgatggtggatatattcctagagtcctggaacttgccattcaggaagagccctgttccccagcagcttccctgtggggtggtgtcagaagcaggcctagctgttctcccacaaatcggtctggacagacttgcagcctctgggcagcccctgcctgttacagagcgcttcccaagattgaaaggtgctgagaaggcaggggagagtttcctgcagctcctctgggagagacaggggattggggcaggcaatagctcttgggtgggagtaggcaggagaactttcagtctgaagttagacagggaagccctgtgcatttctgacctcaagagccccattgttattgcttctcattttgacacagatgtcccagtcaaggccactcctgtgcacagccctttgttctttatggaaagtgctgccaggcacacatacgcgtggctttagatggcgtatacattcttacatgaccagctgaagagccttagggacattttgtgatcagtgggcgtcagcaagtccatgttggagctggggacatgcaggagccagtgcaggaagaaagccttgtttcagagggtgtggatagcaccactttaggaagcccctcaggaatgagagcaacacacttgaaataggaccaaatgcatcttcagcctcacatgctgtgtgaatgccgcctccttgtcagggaacgtgatctgcaccagtcaaagaggcaaatgccaggccttgcactcaggaggtgttgggtaaatgtttactgaactgaattccattcttgggagccctatttgtgccacatctaatgctggaaattatgtgtattctaccccttctcaccatccttcctggtttccaactgccctgttccataccagcctgacccacatgcatgttggagcttgaagctcagtggatacagaagtgtcttgggacagttgtctcagcattgctggccgtggtgataataagcagatgtgactgtgatggtgatcccgacagtgtcagagctctccctagacagtcttcatccatgcatccattgttcattccttcagtagccatgcgtctggcactggccagggctgagcagacagtgctgggagtggtctgcagaaggggcagggcgggggttcatgtggtaaggattaagctagaaaactggaaaggcctttaaagaggggtaagagtttatgactcagggccagtgtgacaacagaaatcttctgattgttgggaccccttcttaatgtggacattgtttaatgcctttaccctttttcacagttggtcagaagtcttgactctcaccagcctggtctgcttcctctgaatgtgcctgaagtcatcagtattccttggatatttagtctgagggctgtccataaagtggagagctcttgagaacacccatgtttgatagccacataaccttgggaaagctcattaactttcttattaaccagtttcttcatcttcaaagtggagctagcactaacacttgcatagctttgactacagctgatgtcaggaggcaggggttattgggaggattcagtgtggcagtgtccatgaagcccttagcacagtgcctgcacctgaagggattcaacagaggctgccgctactctgttctcccaggcccagctctcgctactgtggcgtggctaagtgacaatgggcagtgtgggctgtgggccttttttctttttgtctctacctgaaatccagatgagagtctgagagagtggacagagtctcaggatggcagcttgaggggcctgttctccttagcctgcttgtcttcaacgtgcaccaattttaggcttgattcacactgaaaattcctcagctgccggctgctgggccagaagcaggcctttgtctcagagagacccagagaccatgatgaaggctgagcatacctgccctcctgctggcctctcagactgcagcagagcctctactgagcccgactctgagagggaacagctgggctctccacagggtctgccacccctacagccaagtatgtgctttggctttggcatccagaacacactgccccacccaaacatccctagagaggggatcgatgtggaagcccacaaagtgatctttgtggactctttttttgggggcatgacccgctatcatggttattaatgaggaacttccatatgcttgagaaggcctggagtgggaagcctgggagccgcggcggggctatttaaatccaccacacagagagtggcatcctttctgggccacgtctaccaccagaaaaggaagactggctgggctgggttttgctgtgtctctctgtgaatgtatttctctggcaagacatgctgtcacctggaattctcccctactcttgttcaaaggcccaacaaaggggtggcgcagagggaaccagaaggatgtggctcacgtccatgtagtcagagatgtttggggacctgacccaatgcagacatagccatctttgtccagcaaaagttggcgtggcaactgaccactgccgtttcatttgaggagacatgagttaccctggagaggaatgtgcattcagacttgcttttggcagactttaccataagcagtcctctcagaggacatgagaaatcatgatttccctgaggagcccccatttggggtgatctgtaccttttgccttgaactctcctaggcagggagctgagaagggcgtcttttgtctgtttcagaacactcacctaaaatggtccaccatctggggcaacgcttaggaggctctgtggcaaatctcaaaggcacgtgtgccaagcagcctgcactggagaatgagggattctgtccatgcccctttgtctcttcaggttgctggtggtgtattggtgtccttctctgcccaatcacatggcaaggagaagaaaaacaagtcttcatttaaaaagaacaggaagggaaaaatcaagagcctatgaaaagcattttccaggctggctaggtctgtaatgtagaagagacacaagggagtgaaattcctcatgttttggggttaggtggagtcgggggaggagtggacagtcctttgggatcagctgatccccgaaatgcccaaaagagaaaatgacctccagtatggcttgcttggctcagccgctgcaaaatgggatgggggcagctgctgtcctatggtggtgtaaccctcagagccctcagaacctgttcagtaaccaggcaccccctttcagatcagcaagtctgtgtgaccgtccgatgccctgctgccatctttccaaacaaacgtccaagggctatgcagcttcaatgccgtcaagactcctgactgctaagaacagaaacctgccctagagtgactgaaacgtgttgtctcatgtcactgactagcctaggggtacactagcttcaggcatggctggatccacatgtgtgtgatactaactgacaggtgtggatcaggaactcactcagccctgggacttaggctagaagtggggagaatcctcaaagtgtgagaaaggatggttcccccaaggaaagttgagctcctatctctcaaggaagggaggagttgcacaggcagccagcagatgtccactacagccctcatttgccatttgcagagctcaggctccctcaggtatattctgcagtgagtcaccaccgcgccccacagcaagtcgcaagggagccaggaggaacccagataggagccctcccacaggctgtcagagccccacctggtctgtttggatgacagagccttttggacttgcctggtgtcagaaaggacaatgtcttaggtaacctgggtttgtaaaagccttgtctgtgagctgtcagccaaagacagcagcttttgtggtcttttctctttcctgtggttcatgagaacacatctaggcgctaatgagcaggaacataaataatgaacaaacataccgtcaacaggaaggcaggaagtttttttttttccccaaagactgaacaagatgagcaaagctctgcagccgtacttgcgcattctccacaaaatataattaaaaagctatgcagactgctcccaatgtacagtattgtttatatactaaacataatgtactaataggaatacctcacttcattatgtcagcagaatacgaaagggagatctagcagctgcccttatcaggcagatgggagaccagaaatgttacttagatctaggcagtaaaattgacattgaaccaatttgcctcactcgtgccgcttttactgtgtttaacaaaagctcatgtctgcacataaggcattgtgaggaggactcagcagccataaagctctctgtcatgtctctgcaacataaccagtgaatttaaccgttgggtttcaaagaacagttttggattttcctggaaataagcctacagaggacagcataaggcagctgtgtgtcctgacccttagaaacctgtgagaaccaagacatcagggttgaaggaggggaacccatgccagtgaatgagggagcgagtctagttacaatcacaaggaaagggccacagactccgggcccaagggggaagactattcagtccgcaaggtggagatgggattggcagccagggctatgagtgggggatggtggagagagatatgtccatctggggccactgtttacaggctacccaccttcacagaaaggagttatatgtggagccctcattttagagccagaggtcccaagcaatcacctgtttcattcagccattcatccagcattgattgatcattcgccatgtaccaagctctgccctgggcactacagtctgtgaactcagtcctcatggagctcacgtcgatatgtggggaaacagatggtatacaaataaaaatatacataccaggtggtgatacatgtgatgaaggaaaataaggaagaataaaggcacagaataatgtagggaaggggccgtagtcagactggtctgaggaggtgacatccgagcagagccctgaatgcaatgaggtatgcaggtctctatttcagagctcctcaatcttttgtccaacaagaacccctttgattatttgccccccatgagtcactatgttttgtgagctggtgtatcccagaaaggatgcatttggcaaagatgtagacgtagacatagacatagatatgaccgtgacccttggtcaacctgagaaacggggcaaccacaggaagttgatgcaacccagccccaaagccaacacctgacctgtccaagaggctgggcaatatacatagaaaatgagtccagagtcccagtggcttgtccaagcttatgccagctggtcagcagcagagctaagacttagaccccgggtctcctgagtgatgaaattggggtggaagctgccacagtcagtggcagtatttcccaaacacacaggcatgaaaaaggcagtggctggaatctgagggtgggtcaggaggcctgaggtcttcccaagaggaggccgacagagctgccttgaaggacttcctccaccaccaagggggagccccaggccagggccgatgatgcaggcctgagaaggattcttctgccctcatcacctggggttgcagtgttgatggccaatctgcataagaatctgagtcttatatctccaaagttcaagtcacgatatctgtaatctagggccaggggccccagaccagcaatgctacccagaaggcgagaaggaacagagctctagcaggcagttctctgagcattacgctgccgctgccgtggactgacagctggcctgtgcagcccccacctccacccaccccagcactgtgagctgagggaaagggcagggttcatgttgtttttcagataatgacagcagaggctctgcactggaatcacaagtcctggccttgcccctggctctgtctggtgacaattggcagctgacatctttgcttctggccagagctaccccttattaaaaatggcatctttataatagatttctgcaagtcattgtcaacaggacatccttcttgttttgtaccaatcattcctctgggggactgattttgcctgttactattattttagaactctttagaatacccttttattctatattattctgatattagaatatcaagttttaatatagtattaaaaatatagtattaaatatagtattttaatatagtattattactaattaatatatttttatcgtatagtatatagtattaatatagtatatagtatagtatactaattatatagtattaattaataattaataattactaaagtggtcataattattttttaaataaatgttcgcataccatacagcttcaccccacaattaaacagctggatttttagctgagtcttctcttctttccaaatagccaagggatccatttgtgcccaagttattcatcctcactttgtaaggcctaggtgtcacccagcctctatcttgtcccatctaggttttgtggttttctgcctcccttgggagaagcaccctcgtggtcagacaagccccccagcccgagcagctgaatctgaagctggaaagagctctcattcgtgagcagcccaaatgtccaccgtgaggggtttggttgaatagctcatggcccattcagatgatgagactaagcagctaatagaaccccagggtcacatggagccacatcaatgacttcttcctgaagtcatctctggccatgctggatggagcctggtgcccctcttatgcatgtccacagctcctgggctagacagcagctccagaaggcaggcctggccatgcaggtcgggctcactgccctgtatccagtgcctggaatgaagaaagcacttcataaacagctgttaaaatgaatatacagttcagtgtagaaaacaacatgtacagtgggattccattttagggaaaataatactcgtgcggactcccaggtaaaaggactgaaatataccccaacatgtggacggtggttccctccagctggtgggttgatggctgaaatttttttcttcttttttgcttagctgtgtgggctataatctataagtgttccaagaacaggcctttcagtcagggctggagaagtcagggaaagaggagggaaagctgccatttaaaagtgatccacaattagagcagaaccactggtgggaggcaagatggtttggggacgaatgtgtttttttttaacaggtgagcatttgttttaatgtgtagctgagaaaaaattttgagtagtacattagccatagtactggtccctgctgctcctctggcctcatcccccactttccctatcactcactaggttcaagccctgctggttcctcatcattagaacactaaaggtgccccggggcctttgctcttgctgctccctctgcctgttgcgttcttcctcaccaatatgcaaggcccacttcttatcactgaggcctcagcttcatgccacctcatggctcttaactctacccttccccactaactactagttttgtgtttattactctgtaatatttgtttacttctttatgctttcccctattgagctgtgagtcctttgaaggcagggcctctgtctgtcctgttcgccagtctcctgggtgctgtgtgaactgcacctggtacatagcagtcagttctgttagatgagaagaggaggatgccgtcagtggggggattgaaggaggccataatctcagggatggctgagctctgccagtcaaggaagcagcctttatgcctggtaaagagcaaagcttctgacttcccatcaggggcctctacactcttggaattctgggaaatcagaaattaagacccagaataattgctttgcaaaacatacacatcttacttctgcccaaccagtggtccctctgagccagtcattcaaaacatggatactgtctggccccccagcaccacattcagttgagtcaaggcactgctgcaccagatggaaggagggcccgtggcttgggaaacaagactagtggtctagccctgctttggcactgaattgcctgagacttttaaataatattagcagctgacatttattgggccctactgagtgccagaccctccccacacattaatactgccagtgaccctgtgaaggacaagatcattgtccccattttacaggggagagacctagactcagggaggttgagaacttgcccacagtccaactgtcagtgaataggagactcagggtgtgccccactcttaacacgtgctcagtatatatatattcatggagggaatgaataaacaaaggaaagagtggtgttctctaggggatttgggctgctgcagttcctagaaagccctcccagtccccagccgccaccgtgtccacatcgtgtgccctctggaccactgcagaccactctgcttagtcctcagtcttgatggtatcccctgagtcaggaagccaggtccctcctgcagatccagcaccactggccacaagaccacattccagggaaaggaaatacaagagcagagttagtgggagctccaacaggtagaagaagagggaggagggtccaggcggggctctctctccccgttcccctggggtgcctgccctctgctgagcccacctccaagtaggtatgctgccagtgcctgccagtgcctctcaaccaggcggtgttggtgacatttcccccattgagtcagcttgctgttcatgccttctccttgagtcaatggaagcctccctcaggagggaacggcagacccgtgccagtgccagctccagggaagcctgctgactggggtctctggcttccggtcccaccggccagcacgtgagctgccttcatgcatttcacacacatttcccgagcactctgtgggacaaggggggctctgggaggtgcgaagggaccacacagcgttgtctccaggcaccggtgctgttctcttgtctggattgtcctaccttgtctgtccagccagcacctgctccgtggtcactgctgtttcctgagaggccggtcccaccctccaccatgcacctgtactgtaggtgctccttcaggtcgtattttccccttattcccattatgatttatagaaccatttgtgacattacttctttcatattgttcttccctattagaatgcaagctccacaagggcagggattgtgtctgtcgcttttatcccagcccatgatatggtggctggcacctagtaggtatgcaaataatatatgaaaaatgaattagggaatcaatgaatagagatgcttacagaatatacccctgccccccacccctacaggaacacctctaaattattgggagctggatcttttaagacagaaggtaaaaacatctttccattttgcatttgattagatgtttttctcacctggtgtcacccatcacctcccctctcccaggggagcatcaagggaggtaagacgcctgtagcacaatggaaaggcctctgggggttttgtccctgctctgccacaaactaaatgtgcctgtaggcacatctcttcctctccatatcacagttttccatctggaaaatgactatttctgtgtgggctctaagcagaaccatttatttggccagtcttcgtggcaaaggaggcagggaaaggaactcttcatgagaagggagtggctttcaggtggcagccagcacatccttcaactggcccttggcagatgccacttttttgttgttaattttcatttcttggcactagccttatcttaccatctagattgagaagctctggaagggagggaccaggcctcataggctttaagtcggaagagaccttccagcaggctgaacccaaatgtgtcactccaggagattcgtattgatcaatgactctaccccttttactcaagtattctctctaggtcaaaatggtccctagtaggttaaacacgaagtgtctgtctcccattggaaatgacttgttgttcttccagataacaagtatacatttttaaacatgaaacaaaacatacaaagaagaaagtttaaaaaaatcactgaatgccaccacccaaaagtgattattaatacatcttgttacacatcctcacataataactccctctccctccttctccctccataccacaccctacctcctgcccccacccacaaacagttttatgaaaacagctgcacaggacacacactgtaaccagcattttcactttaccgtcctgtccagatcctggtctcgtaggttctgtggagcccccaattcctggcatgtggcttcttccctcactgacatctgacagttgtttgattaaaaatgtgtcatatgaggccaggcaggtctgtccctacctccactggggaggcagatggcttcaggggccacgtcccattactgccgagatctccctgacggctggaaaccattggtgctgtgcatgggagtgaagcactgggccctgaccctaacccaggcagccacagcacagctctccgtcagtgttcagaaacatatttcatgacacgttaagacagcctcaaatcaggaaatccaccttctcatcccacaaccactcccaacgtgttcatttggtaaatggtaaatgagcagattctctgctttggtccggagaaaccccctctgccgctcttcttttctccactgtggcttgttaacccttgctgctgttgttgctgctcctcctcctcctcctcctcctgacaagcagtggtcctcccagccttccctccccgtggacccagttcacatcctcttcctcaagaggacagacgcgggacgcctgactgactgcacgttctcccccgtccctcgtaccaagtatggcaacaataataatagctagcactgattgactgccgactgtgctgggcactctacatggattcattcttttgatcctaaccatgaaccagctctgttaccacgcccatctcccaggaacagatgcggaaacaagcacccggtctcagctagagtctggctctagaagcccccgcttcctgtggatcattaaagggattgtgatggaggaggagcggcagtccagtcccagggcaggagccagggcgctgataaagggagcagacgaggggcatttaatctagctggagatgtagtgaaaaaccatgtatcccaacagcctagggcctctgagtttgtgaccctccagaagttgggggggaaactgtatgtgttggtacattgtcacactgtcagaggagtctatgattcagagaaggagaatggctgctgggccagatgagcctccaaggtcccttccagctcccaagcctgtggttctgtgaccatataaggccagcatgcctggggagtctcactgcagctaagtgcagtcctacactgcaagggggaagcagagagcaaagggagcccaagtccaggcctcctgcagggtccctaaggcagcagagagagaaatggaggtgcggggagaaccagggtttctccttggttgcctcttcccagaaagctcagacctgtgcaggcgggcttggttgccaccctctgtctctccccatacccacgtgagatctcctctcagcagcgttgccaggtttccagagtccagctggcggtttctgtccaaagtcaaacactccacagtcagtccttggttgttcagacctcctgttccttatggtgcttctggtttggtggcctggaacacccctgagcgtccctgagttttgggtggacatgaattcagaatctagcttgatctccctttgataccctggctttgcagtcataagaaatctagtaggtccccaccctgacacacacacacacacacacacacacataacacacacagggacacacacgtctgcctcctttagtgagtgctctggagagggacaggtctggtgcatctgtgtactcctgactcatgtagttatgtcccactttatccaagcactgtctggagctcaaccctatgccaggagatatgggaagaaagcagagataggtgagatgtggtgctttaattttaaaaattaaaaattagtaaacaagtcttctgggagatgatctctgattattattgttatcagggtacaaaatatgtaccttttagtcatgtctctgttggttctaagtggcagaagcccaaatcaaattagcttattcaaaattgagagggaattatttggctcatatcactcaaaagtatggggtgggcttcaggcatggttggacccaggggctcaaatgatgtttctgggacttgattctgcactcaatcgctcagctatgtagatgaacagcccacctggggctgctgcaatgtgagatgccactgactgttgctaaggtatctcgtggagcctcgctcctgatttccaaatcctggccttgtcacctccacaactcagacctgggctgtcacatgagactgaactctccagagctgtatctccaactccaacccagaggcctcctttccttgccagaacattgggcagatacaacagggtgagttccaatgcttgttttgtgggtgaaatctctggattctcctggatatagggactcagggcagaaggagaagccctgcctttcagcatttgccatttaccagctgtatgtcgagtaagtggcctaacctatctgagcctcagtttcctcatctgtaaagaggagataatttatctcctagaattgttttgaaggttaaatgaaatgacacatgtaaagcacttagcacagagggtaaaccctcaaacatgagctgcaattattctgcttatcttatactgcaaatgaaagaaattatgtttgcaggattttaactttagaatgaaaatgctattattttttttggttgagacagagtctcgctctgtcgcccaggctggagtgcagtggcgtgatcttggttcactgccacgtcctcctcctgggttgcagtgattctcctgcctcagcctcccaagtagctgggactacaggtgcatgccaccacaccaggctaatttttgtatttttcagtagagacggggtttcaccatgttagccaggctggtctcaaactcctgacctcgtgatctgcctgcctcagcctccgaaagtgctgggattacaggcatgagccactgcgtccggtggaaaatattaatagctaccatttgttttatacttactatatggtaggcactttacatttattcctcccaactcttttgcttatgaggaaaccgaggctcaggagattaaattgtttaccagggacacacagctcatcctgtccaatgcccaacctctaaccactgctctactcggcctttctaaaatggtgtggggaaatagaaaataaagagggtctttattgatacatttaaggatatttgcctcaaatcaatgctagcaagaaaaaaagaagaggaatgtggcatttaaaaaagccagagggatgacttaacatttaaaaattcagtgttcttctgagttttgggagtatgaataatatttcctgttgtcggtgaaaccccgtctctactaaaaatacaaaaaattagccaggcatggtggcgggcgcctgtagtcccagctacttgggaggctgaggcaggagaatggcatgaaccaaggaggcagagcttgcagtgagccgagattgcgccgctgcactccagcctgggcgacagacagagcgagactccatctgaaaaaaaaaaggatatttcttgttgttctgtatggaccaaattttctagtcttaagtatttattacattgtagtagaaggggatataaaattctacccagaaacaggaagcctatttttaacctaatataagccagtttgaacaacttatagggctaatcatgatttgagcaatttcccccaaattgcaacatttctgcaaactgcaaatgaagcttctttatcttgggacaccccaggcaacagattgagacctgccaggcagtattttcagcccatgaattgaagtgtgatagaaagtactgtgagcttggagacctgtatcctgttcttggcccaggctcttacctgctgagagatattggggcaattacttattctctctcagcctcagttttctcttctgtcaaatgggtataataaaatcccaccctttccacctgatcaagtgcatataaagattaatgatatcaataggtgtgaaataggttgaaggaagtcccagagccagccataggtctagagaacattcccaggagagtggtagggtctgctggtcccaaatgaagcatgagaaactcaatgcactggcttctggggaagcatatcatagcatggggaccagcaaatcctgcctgcaccactcaggtcacccaaagggtcccaccctcttaggggaatctaggtaccagttgcctttcttttctgttttttagtatttacgctagagtttacaatgtgtatcttgacttattacactttactttcaaataatattatattaatactacttttttcacatacaagaatctttctacagtatagagtatactttcattttatccctcccatcctttgtgctatggttgaagttttatttctatgtatgttataaacataatacatttttcagcttcttccctctctttgtttcaatttagatagtttttattgccatgttttcaagttcactcatcttctgtatgtctaatctgctgttaatcccatccagtgaaatttttattttagatattatattttcatcagttgatattcccttttgttctttttaatgtcttccatttctttcctcattatgttcataattcccttcaatttcttagaaatatttaaaatagatgttttaaaattcttattaattccatgatctctgtcactgctgggtctgtttctgttgactgcattttatcatagttatgggtcatgcttttctgcttctttgcatattcaggaattatttgtgtgatgctgatactatgaatattatattgttgaatgtctagattttgttgttctcatgtaaagactgttggactttattctccaggtagttaagttacttgtagatcagcttgatttttttttaactttgtttttaagcttcatgagggcaggtctaaagcagcctttactctggagctagctcagccccgttgctatggcatgagccttctggcgtctctgctgagtgccccaggcgttcaacaaggactcttcactctggctgtttggaacttgaatatctcccagccttgaatgagctctgggaagcgttcaactgataagctccctgatgcttgttctttctttagtaattgttccttgaccagctgtggaatcttaccctatccagccacagactccaaggagacccctgtgcactctctgaagcatctgaagtgctctctcttcgcagttttctcccctctggtacgctgcccttccagctacctcagctttcctgaactcactttttctcttcagctcagtgaaatggctgtgttctgcctgggttccctcctgcactgtggtctagtaaacacctaaaggcggacgcccaggccatcaccggactctcctccttggtctcccttctctcagggatcacagtcctgcactgtctattctccagtgtttgaagatgcttgtttcacatattttgtctggttttctagttgtttacagtgggagctagcaaagatccctttgagatctctctggggtggtgcaccagtggcctgtactggttatgtactccctcaagatacttttacaaaactggacttaggaataatgaaagtcgacagaaagttaatagggtcattctgatctgctttttagagaaattcagggtgaagacccgcaaaccagcaccaagtggaatttgcagcaggaatcattattgtacgtcaactgatgactggataaataaaatgtggtacatccatacagtggaatactattcagtaataaaaaggaatgagctactgatacatgctacaacatgaatgaatcttgaaaacattgtgctaagtgaaagaaaccagtcacaaaagaccatacattgtatggttccatttatatgaactgtccagaatagccgaatttatagaaacaaaatgtagatcagtggttgcttagggtaggggcagggcatggacagtaactgctaatggatacaaagttccttttggggagattgaaatgttctaaaattagattgtggtgatgattgaccaaccttgtgaatatactaaaaaccattgaattgtatactttaagtaggtagagtctatatatgaactatatctcaataaaactgttgtttttaaaaaaagaagaagaatctttagccattttctcctgcatgaaagtaatgaaggaattggaaggagccttggtatggtagaaaggaggtctcagttattatattggtgcgtgaacgtgtcacaagtagtgttctatctgggactgaaaatatgaccacagaagagtttacatagttcattgagggaggacaaatgtaggatgttaatcttaaaattcatttgctctttctggattactttagttataagaggattcttgtggttttggcgtgagcccctccttctagctttctctcctgcccggatccttgtcagcagtgagcacatgttgagtggctagcaggcagtgccacgtggcctctgaaagttgtgatgtcccctttatgtcttctttgtccctgttcagatccaccagaacgagggtggtatgtggttaaatcctagccaaggatgaaaaagtaggcaaacccttttattgacttttctgttgtcaaagataaagatggttatttgtttgtcttaagtgaatcattttaccttcattaaaagcggtgagttttctgtgaaagaaaaatgcatcatccatttgcagactttttacagggattttcaacaatatgcctctgggtgtacacctaagttgggaccccgaactttgcttaaaatactcatgactaacatacattgagtgcttaatgtatgcccttcctgttctaagtactttcaagtattatcacacctcattgacggatttttctttcattatgtagggaatgtgaaaagactgcatttcttttttccaagattctgttttccagtaatttaggtagctttttcctttagattttatgacattaatgtagcaactcagtaactcagcatctcggctggacctggcccacagtcagccagtgcgtctcatgcctgtgctctctgtgttgatgaggacaatgctctcatcaggtgtggtgtgtgtggtttttctctaggatcatccatgaagatggcttctccggagaagacgtgaaacagtacaagcctgttgtctacagcaacactatccagtccctggcagccatcgtccgggccatggacactttgggcatcgaatatggtgataaggagagaaaggtaggcccctgagcccataagcacagcaacaagaggttctgtctgtgttaccccactgcctcctctttatagtgctgggctgccttaaatgaacgagaagagactccgctatgtttgaaagatatatggtggcacagtcaccaacctaagccattgcatccacccctctggcaaactcccagcaaactcaccaactttgcaagttgcaggggctacaaaactcccggatttattttgcagatgaggaagagttggtgacagttctaaattggagctgccacaacactgtctaagtacctgtccttgggcaattaacttgtacagaaaaaaatatgtattaaacaaaacaagccttgtctggccaccatctcccctccttagaagaactttccttgccttgttgtggagtgaggatagccatttgaattgactgcctttcctcttttacaccaagggctatgttttctgcctcccctgggtaagtatgaggacctacagggctctccttcctgtagaaagtcagtgtcctagaacagggactgtttgggggtaacatttccagtcttctattaagtggtgaatggaataagtactatataaaagcctctaatttgcaaacatttatattaactgttaagactgaactatatacagctacactggcaaggctaaataaaaggagggagggagagagggagaggagaaaatagcctcagaattctttccagaagcagctctttgtccctgtttgggactgaatctcagtgatcctccctctgggacctggagattggagaagggggcggagggcaggtacagcctccaagcacctgggctctgcatctgagcctctggatggagagcattcatctctgattgctgtgtgatttgattgtctattatacacatgtcctgtctttgctaaaaatcatcttcctcacagaggaaaactgtcctggttgtctctgtgtctgataaatcatccatgatagacagctttaaatgtaaaatttgatatgtaatgcacaaaatcctaattccatggggcagagtcatccagcccaggcattggctcctccaggtactggggaattgggtgactgagggtatgtccgaggccagcctgcggtggagaagctgggcactagcagggggacctgggcccatctgccgctcctcctggaggccaagttgggaagtggattctgcaaaggaagcacttcttcctggaaggccggctttgggtttggtcacggagccagggcctgtggaaagagggaatgggggagtggatgggtccattcactgcaggcttatgatgtgcaaggctttgagctaggtgctgtggatacaggaatgagcacagcagggaatggtgtctggttgcagaaaacacctattcagatcgttagaactaacccagatgagtacagtgcttcattcttcttaataacaatagtaggaataaaaacagctaccatctgttgagcacctactggctgccaggcacatactaagcactttacacataatgactcgttttatttaactcattttattacagcccagagcaaggagtgcctcatcttcaggcatggcacaagccacaggcctctggtctgtctgtctccctttgactaagtggggagcgtgatatctgaatctcagccagatagcagacacagtacaaaaggcacaccccctacacacacacacacacacacacacacacacacacacacacacacacacacacacacacacacacacggtgtgtgagatcttccaggagcaaatgtattcatctcccagccagctcttcctaaaaatctcctatactgattataacccagcaaagtcagtgtggctttggaatacttttctccttccattttggaaaacattcattgttcccatgggatttttttttccattttattatcctgaatggagagatgattgcttgggaatcgctaggactatgatacgttaaggactgtactgcaggcccctgggaaacagggtcccttctctggctatttctcctccatggaatttcccagtcaagtcagccttcaagtaggaaggaggggaaggctccaatggaaggagagactgagagctaagcgggactccctggagagtccactggacacagtcgagtccaagcacagttccgttatggcaggtggcaccatggccagcacctggcccatccctagggcaacacagccttgtctggtgtgagcttcctggtgggcaaaggcctccctggcactcaggcacccccttcctgtattcttacacctgtgaggagcaggaaaggagtgaacccgagacccaggccacagcaagccagacaactggaaaaggcgttcccgggagtgggctggtgtggattcgcagcctgtggagctgggcagaagagagtggaagccaccacttggcatgaggagacatgccaggccagaaagggctgcagtacctgctggtgtgggggcagctcagagccaacatccttccctttccatgttctcatggagcttcctatctagcagtacaggcagcaaacaagcccacaagtaggtgactgcataatgtcagataatgctaagggctgcaaggaaaacaaaataaggtgatgtgagagcctgatctgggggtaggaggagcagataattcagagtgggaggacgaggggacagaaagttccagacaagcacccaggccctgagggaggaatgagcctggcgcagaggaatataaagctctgttcagctggagctacctgcagccaggcagctcctgatgtccagatgccctgagcccagtgctgggtccccatatttttctgtctctagggtccccagccactctccacctaggggatctgccatttggatgctggggaaaccaccttatgctgcaggagtccagatccgtgttttggtctctgaagaagagacctccttccctctcatgtttttttcacctctgccacccaccaccactcatcaggggatgtctggaggaagacaaccccactcccagcacctgccggggccagccagccttgcactctccacacagaaaagcgcctaagagcttccttgctgtacctcagtgtcagcccctagaacaggtaggtgtccctgagttcccccggcagctgactcaccacctgtcctgtctgtttcccccagaggaaagaggactggctggtttttccttcagcctctctggtgtggagtcacttggggccccgtgactgtgcgtgagcctgaacctgaaagagcctccgtgcagagcaaacagcagggacctccttacatccgtctgtggtttccacaccccaggccccagcctcagactacagacctctcccaggggccccatgtactctcactcctctgggccttcgctggggtgtgctctctgcctctagtgccgtcctcttttcttcccctcttccacgtggaactgccccactcagtaagggcccactatgcttcatcttgtccatgaagcctccttcccttttccttccctgaggaagaaactcagctcagggctttctccatgaagctcttatctcacacactggcatgaagatgaattgtttatgcttctttccatagagcagtgggccctaaagtgtagtcagagtcctttgagcagctcatgaaagccgcgagccttccctccagaacaggggacacagcacacatctaggagattctgcatgcaatttcaagggggcctggcccaccaatggagtccagcctaagaaccccttcatcatttaaggtcttctgatcaaggcgtatgtcgtttatctttgggtcacctcctcactccagcagccaacacagtgctcagcacttagtaggacttcaagacccatcccattaatggaatgacatttctaactttcccagttttcagagaaaaaaaggcaaagtgcctgtaactttgtcactacatcaacagctgttgattgagtacctaccatgtgtcgggctggtactaagccacgtgtgaagattcaaaggcatgtgagttggagcctttaaggagctggtcatcttcttgggaagatggagctcacaggcagagtgagcacagcccttgcacatggtgggcaggaagagctgcttagtgggagtgaagatggaactgtccctgaagcacaggtacagtttgacaggtgcagtataggtgagcaaaggcccttgaagccaggaaaaaaacatggttggtaatgagggaaaggagagttaattggcagaggaggccagtgggcagaacagaggactggggtctgagcaagatgtgggaaaactagaaggtccagttgggtccagatttggtgggccctggaaggtaggccatggagtttgggttttatcctgttagcagtaggcagccgtggagagattttgagctgggatgggatgaaagtgaaattttaggaaattatgatgatggcatgtgcagagtggacagggcagggagggggatggcagggggagactaaagatgggaggcaggtgaagaagctgcagcaacagaccacgaataaggtgcaaggggctaggtgaggggtcagaaaggcagtagagtgatgcgtagcaacaaaggaaatacaggggcctggtgattaattggctgttggaaaaggatgggcacaaggtagaacctcagccagaaagccaggaggccgggtggggccggaccacagagggtgagtccccttccaaacctaaggggtttccaggtgggggaggtccgcacatatcagatggatggattcagagaactgaagctctgggaattactgactccaggataataacggctttctatttttatgtttcagagcctttattggaaaagggtgggcctaatttgtcctgttatttaaaaaatattccttaatgcttaaattatttaatcctaacagctacctgtgctgtgggtgctattgttgtcctcattttataggttaaaaaaaaatgaggcatggagaggctaagtgacttgcccagggtcatgcaatacaaattatatatgtatacagtgtagacatggaagcctaacaagactagaacctgtgtggcctgggtccagagcagagtcccatttagataggcacagtatgatgaggtaaaacaaatcattcaaagaatcccatccttcatcctaagtctctctaagaatatgaaaagggaccagagacagctccccctgctgttctcaaacatcctctcctgcctcccacatctgtcccaccccactcccttgagctgccttacccccctgggttctccatggaccctcttctccaccccagcgagcaaggctggtcctctctttcccactaaaggggttcctgctctgcctctccttcactcctccctttttcttcatctccctttcccctccccttctatctctccctttcccgccttccctttttcccttttcctctgtcctcctccctccttctcagtccccttttcctcctccccttccctctctccctcccttcctcctcactccagctcattattatgtaaattgtcttcaccttctgagccaagctctccccctcctccttcctctagccttagcccagggcctacatctgcatcacaaaagcagagggccttgttctggctgagctggcctaaactctgacactggaagaaagggttgaggagaaactgaacaattacaggattagaagattcactggaccagtgggggggatggggaaagctttgaacaagcctgtattaatatagttcatcatacacacacatgtgtctatataaacatatgtaaaatatacgtgtgtatgtatgtacatccttgcatatgtaaaatatattgtaaacaaatggactagtagcagtcatgcattgaacttgtatgaggctttattcagttgaaaatactccagttttcattttttcactatttgtgcctatgcctgtttctctcaactataaactccttaagggcagagtgtagatcctgttcctctagcacaatgcctaatacaggaagtattgaatactaagtttaaaccccaattctaccaccagctatatggccctgggtaaattatgtaacctctctaagcctcagcattttggactgtaaaatagtaatgatcctgatacctccctcattcatatctgccgtaagagtaaatgagataatgcctgtagcgtgcataggatagtgcctgtcacatagcaacttctcaacatgtgttggcaattattctcatttatttgtctaaaatcattatttttgataaagtgttgatgaattctactcacagcaatctagtgaggaatgggcaaggttttatctgcacttttcaggttagaaacagaagcacaaggttcttaactggccacccaaggtcatattaccaagcctgggtctgctgaacctgtgccataaagccaaacaccaacactgaagtttacaacaagacaaaagactgcgtttatctgcaggaggctgagcaaggagagtcaggcagctcatgcttaacatctcacttcctcaatggccctacaagcaagggcttttaaaggcaagggtacattttaggaaagcagaagctacaggcaaaaccgtaaacctatacatggaggttatacattggtttggcccaaaaaagcaggatatcttgtggggcaggctttgaggtcatacgtagatccagagattctgtgatatgcagttgattaaggagcaagcctttgtctaaaaccttggggacagccaaaatgaatgttaaggtctggcctgtaggtatgagtctctccaggcccctcaggaagaaattgagaagaaagaccggcgatcagtgttctgtccttagttaccactcttctgaggtctacttgactgcaatgggcattttccatctggtgggggtccaggtttctgaaaaacaactcagggacatatgttaagatgttatctttagtttccatagggaaccaaacatcttgtggctctgacttacttgtgtggctattattttaagctattacaacctccttgcttctcaagttgctcatttacttctcaaggctacctaggtgcctggaatttcccttgaagagactcaagatttttctgtttccatgctttttcagggtgtggggggcagcacgaccctaacagggggctccctgctctatctcagtcacctacctaagcaggaggaaagatgggtgccagctgggcttgccgcccatgctcttgttccaccaggggccttcactggagctgtatcccctagagataatggtagctctttgggaggcagaatcagatttcacatttagttttcagaatgtcattggatctcctctggtaaaagaaatcttgacatttaagtcacacaatggagctcaggacactatgttttttaataatcatggaaatattgtggtgccacctctacagtgcagtgcggttcaccttgtggtttgcatgaattctgaaacagataaaaacaaggatgctatctggcctgtgtctccctgagtcccctggggcttagagatactttagtggtagttgttagatctgacgagggctggaggatgtaatagatgaaggcttcatactcccatagcccaaacacgaggccaggaagaggatgtagatgtgtcccatgctgggtgctgaggctctccacctacaacagccccagagcctgccctgaccctttgccagccaggtgaatagagcttgaaactgctccattcaagcccatctcattctgctgctccattttgcagatggaacataggtttcatctggtccaaactggaaagagacttacccaggggaatatgtggcagatccaggactagagcattcagcttcctgcatcacagctcagtcctctttccatctcagcaggctgcttccagttacccagccaatttggggactcattttctttcattcagttggtcaatcaatcattccacaaatacttatcactcaattacttattacttacaaatgcttacttcctggggaagtgcacaagatggcagaggtgggtacaaagatgcaaagatcaagaggctcccggtcttgggcagagatgccagccccagaatgagaaggtaaacgccttggtttccagggcttctcccagctctgaaattctagctctccagggctcagtgcagcatcagcacagctccctgatccaaggctggatcgggccgcaagctcctggtttgagggaaggcatccaccatctaagccctgccacaaggagcctgagacccggctactggtactttggcccaggatggcagcatcagtggctttccttgaccatcatctaaaaggaagaaccaacccaaaggaactgcagttttcagtatgggaaagaaagaaggactaaagtgtcagatttttgaaatgtctcttagctgctcctcctcattagagtcttgggtttccttagctaaaagtggtgccctcccccaagcccctcccagctgccccccagcagcacactctacttcatggttgtcttacccttggggccagacagcaggtctggaagaacaggtcagtcttgttcatcatgcccagtgctagcaggggtcagtgaatcctgtgcctgagtgattccattcatccaatgggtgtgtgcttctgggtcaagtgctggcttggtactagggatatgcatggcctgaacagatgtgtccagggaagaaaggatgaaagatgcagaatatgcttctttccatgccttcctgatccctccacagcgtttgccatgcgtgcttccattcatgtgttcccacagcggtggctcagcctggagcaggcactcagcctccagggctccagcacattggcccctgcagaggccccagccagcacctagccttcatctggcctggcctgccttctcttccgtggcgtgcagagttgagtggatgctcaaggctgggctgccatcagtctctacatgttcattgcctgtagaaaagggcatggaattttaaaaaggaaatttaaatgaaagacttcaacaaacagtaaacgaaaactgcaagcggtgatgccttgcgcttgtgtgctctctttctgtctttcacactccaaccccgccccccaccgccaccataagccctaatgactctgctctgatggtgggaaaatgttataaccacgtaaataaatattcctcggcatcaggactgaagtggcccccaccaatcttggatgtccaagagccaccccattgcagcccctcttctacccccaccaaacccccacctggcagctacacagggggaactgaccgcctcccctctggagaggggccattgtgtgagcatcctttgggcttgtggtacctgtttcaaggtggcaaaccagctgccaagcagacttcagccttagaagccataggccacagcagagaggggcctgcctggccagtgccctgtattttgggactcctggaatattgaaaattgaagaattcccaaaacaaggtcacaaaatcgtgttgtattttaaatgcatctacttaacaaatcagtactttgggcctaccacaaatgcaatggaatataattgtgctccctaaaaagacaattataggatttacaaaaatattaattgacagtgcagtgctggccctgtggtcctgtagtgggacacaagtcagagccctgtgctgagcactgtagctttcactgtgagagatctctctcccgactatgtctgggacctcatttggtccaagccccagaattgagccctttgtggatgtataatccctttctggccaccagatataccgtggagtagcctaggaaaccaggaaggtagattttagtttgctgaaggaagaggcgccagggactgagaaagggttaggtttgaggcagcagcaccacgtggggaaggctgtgtggggtggggacagccaaggtggtatctgcccctgccctgctgggagtgtagtgggggtcacagtcccacacatgtgagatggagatggcttccctaggaaaaccagagccactttccatcctcccgctacacacatctgcacacacgctcatcagcttctgctttactcagctccgttccctcttctttctttgccgggcaaccaacagtggtcttatgtcactgctgaagcccccactctgagtaagttaggacatgttggttgcaagtgatggaagatacaaccacactggcaaactggcttattcaaacaaaataaaacacaaaacagccacaggcccagagagtcagaaattcagacacacatgtggggagtgggggcttgatcagcagctcaggggacgtccctggcttcccccatctctccactctgccgcactgtgtggttttcaccctcgactccacagcatcactcctgcaccaaggaggaaaatggctccagcagctaagtcatcacttgtaaccttgtgtgcatcctaggacatcaccaagcacaaggtgcatctgagcaaccaccaagtcctgcaagtctctctctctctctcagtctctttctgtctctgtcgcctctgtgtgtgtgtgtgtgtgtgtgtgtgtgtgtgtgtgtatgtgtgtatctgtctgtctgtctgtctctctctctcattgcccctccttgacccaatcaccatgaccaagggggctgaggggttcctgggataagagtgaatcccccagaggaaaaccagaagctcctgaaaaaggaaatagaataggaggaaatgggtgctggggaggccaccagccgcccacagatctctccttgccattggggctaccagctgtgctgccccgtgcaggagatgactcatgtcgtagggtggagggccggccaggctgagtccactgcagcaggaccatgagatggctgagctcggcagcaagccagcactgctgctcccatggcagcctctcccctgaggtcccaggtggcaggacacatgggtgcacagcccccagcccaccactgaccaatggtctcgcctttccactgtggccgcagcagggggccagggaagagtgggaggtgaagaggggagataggctggtaacagaagaggcctccactagaagtcaggtcccttggagcctgccccagccagcaacagccttagagctagtcaacacctcgcttcaaagctggggaggcactgccccagagggcgggcagcaggagtcagagatgtgactttgaatcctggccctgccctctgccaggcagtggacttagcactagtcacctgactgactgaccctcaggttcctcatctgaaaactggagatcataataatacctactcacagggttgttgtggctaaaagaaatgatgcatgttaacagctaagcaaggtgcctggcaccaagtaagtgctcaggaaacagctactgccatctccctcctcttgcccatacctcactgcctgttagtgaagggccaggacaggagcctgggtgtgacaattgtttcagaaccagagcaaagggttggtgtcaaggcctcttagctattacaggtcaaagaggtggtgtcatcccctcccagaatcagctgtcccttctgatttcaggctggaagacagtatgcctcagcacctgccctcttgctggctttgcaggagtggagctgaggagagctgcttctgactcagggcccagcatggcctgagagagaaacccaaagagatagagacaaggagagagcaggagagatcacagagagggaggagagtggcagacactgtgtgactgagaaacactgagatggcgcgctgcatagaccgtgcaccagtgtccagtgtcgatggtgcactcagcatagcatctgcgcagagtaaatgctgctgaaatggctactgctccattccttttcattagggccgcctatgactctgtgaatgtcattccacagcccctccagccagacgtgtcttctttctccccctggatgccctcagcacctggctgtctcattcactcactggtttatttacttgagaaatatggacgtggccttctctgtgccagcagcatgctgagtgctttgtgcaccatggtgaactaatgcaagcaggtgtactgctgctcagagctcagctggcgagcaggtggacagcctcagtgattccagagagcagagtgtcctgacagtcggcctgtcctagcctgtgctgaggacggggtatctgacaaagagctgaagggattggcaccggtggggtctcaccagccaccaggataggagggtaaaaagactgctcccaagtgtccccatatggggcacgccaggaagtaagaccagagcacatacttgggctcctggctgtagaagttcccaagctatataaggagaggagaatcaggcctggcctctaaaaggaggctgcttcctcttggggaaaagtcagggaggtgggaaaatgcagccttcacagccctgtgtcttaagtcactcagctctgatagcaagagtggccagcgtgggggccggtcttccctttgcgttactttctggcctctggagagtcaggagctcaggtagcctggagtcccctggaactcagcagcaggggtggaggcgggtagggtctttgtcatgaaccggaagcataccaggccttcacttagaacactgacccctcacagaaagaccagcccctaggccctgcctcggctggcagggtgacctcaggcccatcccttaccctacagggtctccattttttcatccattagatctgaggaacgacaccgaagatcgcccctcccccaccctacctcctttttagttctataaattcccctggcagaacttaattgctaagtttaggtgattgccaagcacaaggttcttcctttgtatccaaaaaagggggggggagcggaaaaaagagaaaaaaacacagtttcaaagttagggcacctgtgttcaattgaagactgactttctcttaaggagggagttgatgttcccacagccgctgggctgttagcagcaaaagcagcctagcaggaggggcagccttggtgagcccccagtgcaggccacttgggccacttgccccacagtatccagcgcactggggggcagatcagcctgtcactgagaatgacacactcaagtttggagccgggacctcttttttgccatccatcaatgagagtggttcagggttgtcagtctaagacgggagtatagcccagggctggggactgtagaaatgggcatggtccccacccggtggggatggggacaccggtgtggactggcacacatgggccacggagccatcggggtgaagacactaaatcaggcagaaaaacactgtcaagtgttaacactgcagcatctgtgtcaagggtaaccatgtctcagggacgcaggagatgagcggccccatgcaaagctgtcagttttagtctgatcagtccaaaaggctcccggtgtggggagaggaaggatggatttcagtagcagcttgctagatgaggatgagatggcagagcatacggcgcaggcttgaggagggggtacggaggccagggaggcctttgggcagctggctgacagcactgttacaaacattttgcacacattttattgattggcccactcctcaaacccagagcacataaacaagtgtcccatggtaccattggggtacctggaacccagagcagtggggaatgtccctgccccagtcccccaaacaattgcaccagcctctccagcttcccactgcctctcttgcctcccaccccgtaatctgtgctccacacaacagccaaagtgagcttttaaaaatgcatatctaatcccctgcttaaaagcgctcagtggcatctttgctctcaggataaagccagccttatctcctgtagctcctgccacaggctctgctgctgactctttaaatgccacgacctcctggcctcagggctttttagtgagttatctcctccataggggacttctccaccactgcttccctcccccaggcctgggttccaccatcacttcccctcccttggaagcctttcctgactctccgaataggctgggcctcttgtcctgactctcagacccctggtatgtgtgctcacctgagtatttgatcaatgtttgtgccccctgacccaacaaggctgtaagggacagggacagggcctatatgacttcagttggagtcagtctccagcacccagcacagtgcctggcccagaattggtgggtgctctattgaagtctgcagctagtccgtggtagagctgttcttgatcccagatgtttgaacacctggcccattgctttctgtatggccccttgtaaaatcagagcaggtagttaaaatcagatcctggagacccagaatgagtttggaacctgagttctagaacccacttgttcataggccctcttgcaggcctcaattttttcacctgctgaattgaaaccacacctgcccacgcactgtgcaggaagcaaggagtaggggtcacacacgtgaggcatgtgagagggggtgcctcctgaaagctggctctgtgcatccactcctggaacccggcccctctccaggcaaggcacagaggcaagcacctccaaaagaaaccctatacccgttagcattccctccctacccctctgcctgcagcccctggcaaccactaatctgctctctgtctctatggatttgtctattctggacattttatataaatggaatcatacactatgtactcttttgcatcttgcttctttcacttggcataatgttttcaaggtttttccgtgttgtagctgaatcacatttcattgtatggatataccaaatttcattcatctattcatcatttgatggacattgaggttgtttccaccttttggctactatgaataatgctgctgtgaacattcatgtacaagttttgtacagactcatgttttcatttctcttgggtacataactaggggcaaaactgatggttcataaggtagttccatgtttgactttctgaggaaccatcaaactgttttccaaagtggctacaccgtcttacattcccattttccgcatatggaggttccagtgtctccccgttctcactaatacatgttattgttcatcgtttttattatagccatcctcgtggctataactcattgtggttttcatttgcatttccccagtgattaatgatattgagcatcttttcatgtgcttttggccattggtgtattttcttcagagaaatgtctattcagaattagcccatctctaaatggggttatttgtcttacggttaagttgtaagagtcctttattctggatacgagtcctttattagatatgcgatttgcaaatattttctccccttctgtgcattatctttcgaattttgtgatggtgccctttgaagtctcacctcattctgcccttgcctctgcccccttgccagagttcctcactcccccagacctactcatctgtctctgttcctttatgctgctgcaacaaaataccttagaatgggtaatttagaaacaacagaaatgaattgcccacatttctggaggatgagaagtccaacatcaagataccagcagatttgctgtctggtaagggtttcttctctgctccatagatggtgccctatcactgcatcctcaggtggcagaagggacaaaaggctccctcaagcctgtttataagggcactgatctcattcgagatggcaacactcttatgatctaattgcttcccaaaggccccacctcttaatatcattgccttggggattaggttttgagcacgcgaattgtggacggacacagatattctgaccatagcaccattgcctgccctgccttcgggacttacactcttttggagctgaaggaactggctctttcttgctccacattgctccacattccccatcagcgttccccagcaggctctttcctagcagacaatctgaactgcacccaggctgcagtcatccctgagtttgggggcttctaaggctgtgtgctgagttgtgcctgaagcaggaggagcctacaattcactgagcatctccctgtgcccacgtgctggatgcctcgcaggcatggatatatcccactgcatccccagaacaatctcaaaagatactggtatttttctaccctgtggataaaatggagtcagaatttaaatttggatttttttttaagacaaggtctagctttatcacccaggttggagtataatggcatgatcttggctcactgcaacctctgcctcccaggctcaaaccatcctcccacctcagtctcctaagtagctgggactacaggcacatatcaccatacccagctaatttttgtattttttgtagagatagggttacattatgttgcccaggctggtctcaaactcgtgagctcaagtgatccacccacctcagcctcccaaagtgctgggattacaagcatgagccactatgcctggccaaatttagaatttaaaatggagctgttcgctgtcttcctacacagcatgttcatggcttatgagctgcacgttcagctctgctgtcctgtttgataattgcctactctgaaaagtatttaaaaatactggagaaagtattaatacctccctaggtataagccctagtatggtagcaacagaagtttcttgacactctggaaaatgcccaactccacctgctgtaaccagcagccccgaaatctcagggcctcaacatagtgaacgttagttccttgctcccaccacagtctaatgtggaagtgctgggggttgccctgtcccacgtaggcccgagccaactcccctgtggtcagtggttcagcctcagctgagggtcttctgctggactcctggtatcaggccagtggactggggaaggtcacaaggggagtttttggggccgggccagaacttggtccctggtcacacctaactgcagggaagtctatgaaatgcctagctgtgaccttggaagaagagatgaaatacttttgtcaatagggagccagtctctggcatagtgctcaggtgtgaattttagccaaactgctgccaactggaagcagcacctctgctggggtgacaggtccattttcttggctctgttggctgttttctgctcctcacttgggcccagctgagcagttcaacagctttgcttctctgtgacatgacagagcccacctgaaaattcatttcttggtggctatggtggtggcttctcaccctgtctcctgtcccagctctaaaaatggattgcccttctgatatgaacatgcatgacatctctggaacatgagtcccatgttctgtgtgcagacagtgtgccagcagcttctcctgtgtgatgtcagtgtttccctggcatggcacacatactttggtggaatatgagattaaatggtacgtggataaaccttttattcctacttttgtagttgcatatcggttttaatatgtacttgaaaaaagatcacataacatatcaaacccataatttcatatctatgactgaagatgaggctaatttcagagctgtcctgatatcaggttggggaaagcgatgaatgaatgactgggtttgggaacgttgcctggggtgaaaaggctcagatgcccagccgcctcaccggacttgctagtgtgtgacctctctgcacctttcctcctctgtagcatgttcccacatgaacatagggtataggaaggttggtgtgtcaagtgattaacagcagtacctggcacatatttcatgcttagtaggtgatagctcctaatgttcttaggaaacaccaagtcatatcacttaactgtgccaacagtgttgagacagggttattactatactttatagatgagctgagaaaggttaagtcgcttgcccaactggcagcagagccatgtgctgacccccagtgtgcctgactcctacctaggccaggctctgcgaggggagtttacttgcaatcctggctctggcactaacttagcaggacactgcaggcaggccccgtcgctctctgggcttcaagcttcccataggcgggatgggggaccagcataactctttgtgcaggataagtctcacagaatgtgggggctgctctctttgctccaaccacagcagaaggctttgctttaaaaaaaaaaaaaaaaaaaagtggactgggtgtgagctaggtgtctgcatgcaatgcccctcccagatcctctgcttgtctctggattctttctgctgcctctcttgtcacacttctttatgaccaagcttccaacctaccccaagtgtaaacatcatttgtttgtccgtcatctggtgatggacatttcacttgtttccattctgggactcttatgaataatgctgccagaacattgatgtacaagtttttgtggggacatatgttttcatttcttgtggtaactacccaggaatagaattgctgggtcacgttgggagggtatgttaactgcataagaaacttccaaactacttccccaagtggtagtactgttgaaaattccaccagcaacatataaggattcctgttgtcctgcacactcactgacatttggattgccagcccttttcattagctgctcaagtttgtgcacagtggtatttcactgtggttttaatctgcctttccatggtgactaataatatttggcaccttttaacatacttttgggccatgcgtatatcttctcttgtaaagtaactgttcaggtcttttattcttcccttttattgggttgtttgtcttcttattaatgagttttaagatttttttaatatccctgatacaagttccttgtcagttatatgtactatttcatattttctcccagtctttggcttgcctttacaattagcatttttaaatggtaaatggtttgtttaatgaatgttgatttgtccaccagcttccacgtctagtccatacctccctttccagcattgggagccctttgctagttatttctatttggctgtgagaggttttcgtctgcagataaagaagtgatcatggtatcagaggttgaacttgtggactctggggtcagacagtcctgggtccaagtcccagctccgtggctcgcagatgggcaggtccttctcgtctgttctctgagccttgcttttctggtgtgtaatatgaggataataagtcacctacctccttgtgctgctgggaagattaaatgagatgatgatctcaggggcctagcacctatcaagggcacacaaaggctgggctgtacctgttaccactcctgttgctaaggcacgctagcaccccagggccagcccatgtgaaaccactctgcacaaagcaggcttcttctcccttccacctttaaatcgaaagcaccacctttctcccagttatccaagcagagaccctggactcctccttcccctccatgtctcgcttcctgttccagaatggctcttgaatcagcccttcctctcgctgcccaggccactgccccagtgaggcagccttccctcttcccagtgttcgtacggtgctcctcaccaaggtggtctccctgcctcttcctcccaatattccaccctgtttgccgctgacactgttgtcaaaggcttcctttctgaatcagaaacctggggctcctgggtagttgtttgggggagaccaccttgcacaggcaaggctcggctgtcactggcgtcttccttggttataaataacaggctctattcttagccaaacagcagttaattctcttcccgtaccttccagagcctctattagggaccttggccgtccttactggagacaggccattccttggcctttggcaggacccattcctttgatacgtgatcagaaaattcaattataaagccaattactgatttcctgagctttacaagggagactggaaagtttgattaagtttgaatttgtgtttggctgattgccagccaaaaccgaatgggcttgtgggagagttctgttgttgctgattctgttcctgttttgtggcagctctcttggggtgggggcaggcacactggtgttgtgttgtgggttttttttagacccccttacttgctgaatggctattcctctgttgtgatgcatgagatgtaaatcccccaaagactggttgccagagcgacgggctggaattgagctcagctaaacaaagtccttcagctttgaagggagaagcgcttgtttcccatgtggagttgagttatagtggccctcaacaaggctgcattcaaggatgcctgcatgaacaggcatgcagagggggtcgctgagcctgctggaggatcttaagcggcgtgtctgggctctaactgcctctaggacctacccagggggacacacagatgctgagcctgaggatcaaggctattcagggtgcctctgcccagctggtcaccctcaccctagaacctgcaggactggccttcaaacagtgacagcctgctgggctccagctagagcccagcacaggtggggattgaaaagcaaccctttgtctctagccaaagtacttgcttttttagatacttctgggaaaccaaacagagcccgtgatgggaccaggttggagttccaggtcagaatctgagttgtttctggagacccaagttccttccctagcaataaaatgagggaatcccagttctctggaagctgtagccatcccacaactcttcctacaaggtatacattattcaggagagatggtggggccccacttcaaagcgtctccctcatgcctaaaatctcccagttagagccctttgggtgttaaaggtttttaggtctctaagaatcctggttaaagtactaatactcctggaaggagaagcgtctaccagtagggattagccatcagctaactgagaaaaccgccctttgggagtaggacacgggattccctgtacccagggtggggtcagataaactccacctgcctcccagcttgcttgaggcaagatccaaatgtgacctcttgcaccagaaacattaatatctctaacattcgtatctggtgtgatgtaccagagctcacagaacactcacgccctgccctgtaccctcatccatacagcaagctcatgagccggcaccaccttgacccccggttgcagacaaggaagccaaggctcagggaggccaaccaccttgcccagcatcacacagctgggagtacagattttggactcagacctgggatttctaaatccaaacccaaacctgttttctgtgcgcacagccacccacccggtggatgacatggacactgcgcacctgttttgtctaactggtgtgtgtgtgtgtgtgtgtgtgtgtgtgtgtgtgtgtgtgtgtgtgtgtatgcatgtgtttaaaaggtgggaattttttgttaagtttgaatttcagttcttttcttttcttttttaaatgaaagtgttatagcatcctggtggagttgtaattaggaaattctgggttagtcagctaggcagaattgaaaaataacccggcagtgctggttggagtactttttcccctccttagaaattcaggttttgtcaaactagggaggagggagttgtgaagatggaaaaatgtgtgcagctgggctgggtcagggagtgtgtattctcttctttatgtagaactagacgattaaaaaaatagttatcgagtgggagtgctggctcacgcccataatcccagcactctgggaggcaaaggtgggcggatcacttgagcccaggagtttgagaccagcctgggaaacacagcaagaccctgtctctacaaaataaaaataaaaaattagccagccatggtggtgcgtgcctgtggtcccagctactggggaggccgaggtgggaggatcacttgagcccaggaggtcgaggctacggtaagccatgttcacgccactgcactccagcctgggcaacagggcgagaccctgtctcaaaaaataaaataaaatagttatctttgtgtaggatgatcttccgtatgtgcagacatgaggcagcctgtgaaagatggtaaggaaacaggtgaagaggaaccctggctgggtcccaggctttggcaggaagaggatgcgagccccagatgtgggttaagggctctcaaaccaggcgcatgcagagagactccattgtcacctcccttccagcttgcccttattgatcagcgacagtgatgatgacaagggcagtaacaacttcccccacacgtggggcatatatgccaggctctgagacactccgtcatttctgtgttaccctgacagtcttcattttaatagtgatatgcttattttaataagaatccaaaacatagcccatctagctcatgactgcccagatattagaatggggccaaagtatgggtttaactttttttaaaaaatgagttaattaggctgggcacgatggctcacacctgtaatcccagcactttaggaggccgaagcgggcagatcacgagatcaggagatcaagaccatcctggctaacacggtgaaaccccatgtctactaaaaaatacaaaaaaaattaactgggcatggtggcgggcacctgtagtcccagctacttaggaggctgaggcaggagaatggtgtgaacccggtaggcggagcttgcagtgagctgagatcatgccactgcactccagcctgggcgagagagtgagactctgtctcaaaaaaaaaaaaaaaagggttaattaaataaaacatatgaatataaggacggggtgtcatgtggattgggcagaaattgtgaaaacaagacagaaagatctggagtttgggaaggcttgcctcatccatatgagcaggtaaaatgattaacctcattttacagatcaggaaaccgaggctcagaaaggttgagtaacttgcctacagtcacacagctgacagatggcagagccagcaacaagacccaggcttgcctaactccaaaggcaaggcttggggctgccatccaggtgaacattcctaccttcactctccagatgaagccctcagcgctgggttagctagccttcctggggctgtccaaccctggagagagaaggcctttctcactgctttctgaagcatgaacagaggcggatcccactctagggaggtagggccctggggcctgcttcctccgatctgctgcgtctaactctctcaaataaaagccttttcagaaagggcctggcatgaggctgcatgtgactggcagggctgtgactgccaaggcttcactgtgcttcctcacccttgccccagccccacccagcccgaggcagcccccaccttcctttcttccctgatctctcttagctcttcctttctttcttttttgtctctgaatcattttttccaataagctgttgattgtctgttgaataattctctgaatgatttctaaaagcctcctgatcactgaaacctcagagttggaaacacatttatatttatgtggaactgagcttttagaacattattaaatttgcatggggaactagcagagtagccacttccacacaatccagatgatgaggaagcatcatcttcaggaggatggaaatagttccacaagccactctgcctggcttattactctgctgggagaaatcagcacagtctacctgggggtccagaggcagcattgacccagacaatctgagcaaatgctgtggcttagaaaccactcagatgcctgtgttttataattggccagcttcctaacctgggattctggagctgccacctcagaaatggaaggcagattggggttcgtgtgtgtgtgtgtgtgtgtgtgtgtgtgcgcgcgcgcgcgcgcacgcacatgtgcttgtgagtgtgtctgtgtccacgtgtagctggatgtgtagttcctgtgggtggtttagtgtgtgcatgactacatgccttctctctctaaggagagaggctgtagcttttgtcccatgtcaaaagggccacttgcactaatgacctactatgtaccagctgtgtaagctgctagctgaggcctctgagcaggataattctcatagaatttagagttgagaaaagagaaacaaacaggaaaggctgtagatagtggtcaggcggtacagagaatttaaataaatgagtggcttctctcagtcaaagtggtaccagctggcccctggctgcagctcaccacggccaactgtgtgacatagtaacagttaacctccactgactggtcaccgtgctccaggcactgtcttaagtggcttgtattcattcctttaatcctcataacaccctgagaagttgggactatttaaacagattagaatgctaaggttttgtgaggtcacacagagagcgagtgacagagtccagactgaatctggggttactcacctccaaatgcttccctgggtaaaatactggcctctccagactttatttttctcatctttaaaatgggttgattcttatttggcctatccctgaccaaaaaaaataatattttttaaaatataaacttttacacaaatcgatctgaaaatcagcatcctgctcccacttggctctggtgcccttgatggagctgaagtctgtctgggtggttcctgagttttctcagattccttcagggctgccagttgaaccaccaatgtgtggagttttacttaagcctcattttataaatcagaccatttgacttgtctcccactaacttgtcaaagttccagcgagcaagttttagttccagaagccagatgcttgccactgccagctccctgaggtgggcgttctcaccagccccattccctgctgagcagccacgggcccatctcccagcccagggcaaggccacatttcctcagacctctgagagctctgaagtcagcctgtgtggctggggtggatacaggccagctgaagtggacagaggataccggtgaacaataaaaataacagatagctatggcagtcaggtaaacagagtttgggcttacgctaacaatacgattgatggggtgggtttgacctttttttgtttcaagccataccaagaataccagtggaccgtgtcacatacctcagtcaaaacaaaagtgacttggatttgcttttgagggtcaaagaaaggccttacagaagggatgtgggggagccggaagcacagacttcgggggtcagaaagatctagactcaaaccccagctcttgcttccagctctgagccctgggccccctttttcctctgacttgctgtcagtgatttcttcagggcatgaagaggctgcaagaagggctttctctgtttgccctctaagcgcttaccacagaagcttggcatttttccattatttttatgtatgtgcatgtgtgtggagggagattgggtttttttaatttttcagttgcattttttttgttttgttttggtgagttcttctttaccaaaaccctgacgtgtgcttgttttattgtgcttctcttcccagtggaacacagctaaaccattctgcccggcggagtggctcagtcagagtgccagatgtgggtgattcataagcgtagtggccatcatgttgaattgttactattgtcactgagtgtgctgagcacctgactgcactaacttgtttagaactcagccgtctgtgaggtgcacactgtcaccacccccaatttacagacgaagatactgagaccctaataggcctgctcccaaatgactgctcacagcgttactcccttgatgtggaggtgtgggcagaaagtcctggggctctgaacgcccccgcccaggggtcctgcctgtgggtcatccagcagcagcacctctgtccagtcccacactgatgtgaacagtcttctctgatctacagctcacaatctacttcagccccactgtcaccctctccccacttgtgtgccgtgttcagtcctcagggaccccagaaccagcccaagcagactaaggttccctgggttctagaatcttgatagctcaaaccactggcctctccctgaagggtttcgacacacccccccaccacccacctcctctctagcctctgcttcccagccagccctacctccttcccaggatccaccagctaagccaccagtgaccctggaacagtgaactagccccgcctctctgtgcctcagtttcccaacttgtatgatgagggagcatagacagaagcagttctatgggcccctccagctcagacattctccaaacccccatcatctctcatttgacaactgcagtggcctccttggagtgctccctggagccactcttccaggcctcccagccccatctggctatacacagcagccagcatgagcttttgaaacaatattatttcattcccacctttaaaaccctccgtgacttcctaccacacatagaataaaagccaaactccttcccatggccaacagtaccctacatgactgggggtcacgcccgggctccctcttctcagaaggtgctttgaacacagccagcccgccagcccctggctgctaggagctgctgccgtgttgccaataccatcactgtgtgtattgatttctcacccaactggtgtccttaacttcatatttatggcttgccctgacatttcccttctcttacatgttccaaattattaaaaacagctgctttataattaattgagcaaatcacagaaaaacactttttttctgtctataaataattccaccttaacttttctgggaggataaaatgctgtgacaaggaaccagcacacacctggtatctactatctcctccccagcctggacttgaattcatctgaaccatctctggttctctccccggcctgaaacgggacctccacgcgcagccgaagtggggtcggtggagaagggtcgcaggattcctgagcagcttttgactgctcgttctgcctgcctgtggactgcttcccatgatttcaccactgccttttgtatgctgagctctgtgccctgtcccatgctggggtggggtgtgccaggggaagacatcactcctgccccagaggaatcacagtcttgttttccagatggacacttggagacccaagcaaccaagtggtgtgatgctgagctcagggtggggtcagaggagagccccatgtggaggctggcgggcagccttcccatagcaagacccccaccagcgaggcttgccacacaaaacgggtgaccagctgccccaagagtcagctctctgtgttccctgcaaggggctctgctgaggccagcattttctgtgtggacagaccctgacatgggagaggctgggaagcaccagagcatgagctggcatcttgggtgggcagtgacttcaccctctggagcagtagagcccctcgtgactgtcagacagtttatggacttacacccttgacaaagcatcacaaagcatgatggctgacagcgacctcagagatgatcacatctaaagggtgacacggatttgtcttgtgtgcttgctatcattgacccccagctcttgtccccggcagtcactgtatttcattcatggcactgaatctgccctcagagttctctcaggatagccattgccccaggcagccactaccggttggttgcagtcagccctcaagttgaagccagtttcccacctctgatctacccaatgcgacaccctcattttatagacgctggcaagggaaagggcactgaagagccacagcagaacacctatcttgcaccccgagctttctaaccccctacttcattgctttttagatctttccctaccaagccctaccaagttcattcacttggcaaatgtttactgagcacctactgtttgcccagtttgttggtacatcctggatacaagagggcgcctggtataggagcccagcatccagtggagagacttgtaaacacagaacacagaggctggtgggagccacactcactgccaccctcaccggggagagcagagaccctgctgccccagacttcagggagccccctgcgtctgcttttcttgatcctcagggctttgcccatggtactgagggcctgtgttctctttaatccttcctgccatcccaggcaggcagattgcaggtccctcttcaagctggtgctcttgaaatattgttcatcatttattcagcaggtccaggaagatgccattaatgaaacttgtttctttattgttcaaaatacgggatatattagatgtgctggacttaacataacactttaacattgttgggagctggctttcatgtccattgttcctaacaagagaagactggtgcctcacagcccctgaaaggacaagagcccataattacacaattaggctcaaacatcagtttacaactttttttttaatgtgggcaaacttcacttttctgtctagttcatgttttttcttgttttcattcacaacattccaaaccaggtaacttcttaggaggaatattagtgggtttgaaatttacataataaacaaatgcctccaccccagaagacagccctgtatcatccatgactcagtttcagagtttcaccgaccaaccacttcggctggctgagagctggtggcctggcccatgcctacacgtgcagtctgcacaggtggggttgtgttgatactcagctgaataggtgggtgacaaggaaggacactgtccacctccactggagtgcatcagcactcgtttctccagttgctctggaagcatccaggacaggtagggttagccggccccttattctgctccccctgtgacattgcagctaccctcatggctggtatgccccacagcctggctctcttggatctcctgttgaggtaagcagagaccttgagaacaggctctgggccatttctcctctgcttcctgaccccactttcagctcaccccgccagaccttgcaaggatgaggagatggtacctagtgcccatctcaacgtatagcctggagtccatttattccatgagcagcatcttgtaactgaacacaatagttaatgaagcagatgtaggccctgccctcacagagcttacaattcccctaggaagagaaacagtcatcaaggaaacaaacctgtctaattacaccttgcaataagtgctgttaaagaaaagaaaatcatgttaggatgagaaaaacttttgctttagattgggagatgggggtgatcagggaaagccttatcttgggggttaaagtgagactggaaaaataagaaggagacaatctggcaaagactcgagtccaggaggagccagtgcagaggcccctagtggaaatgaggctggtgtgtgtgcaaagcctagaaagggatgggcggagggcagtgggtgaggctcaggggaggaacgaccttgaccccacatggccttgtagatagagtttggaatgatggagagagaaccccaactcccagccccagggagagctccacctcaggggctgtatttgtttcccagggccgtcataacaaagcataatcacagttctgaaggctgggagtctgagatcagggtgctggcagggttggtttcttctgaggcctctgctccttggcttgtagatggctgttttctccccatcttcacatggccttccctccgtgtgagtctgtgtcttaatctctataaggacgccagtcctattggattagaacccatctaatcattttaacagaattgcctttttaaagaccctgtctctaaatacagtcacattctgaggtcctgggggttagaacttcaacctgtgagttttgggggaacacagttcagctcctaacagggagcttccctgccgtcctctgagatgaagctcgtggatcagcatattttgaatgctgcagcaggctgaggagcccagttccactgcttgctccctgctccctctttgttgaaaggaatgattcacaggtgttgatgggtgtcaaagataaaagggcaccaagcagcctttcttaccgaaggtcagtcagaagccttcctagcgtgagttagtggtgttaatgcagggtcccagaacaacctggaatcttcagcggcccacactctgggaaatccccttcatcgttgtggcggaatctgcagagtttaggcagggaagtgagttgactggccagggcgcaggagagctggccaagctgcccccgctccttcagggtttcctcccaacccctagcagaaccctttgctggagagaggcccagaaagggtagtgctgaattcagtgaggtggacttatgaccagctgtccccaagacccctgagatcagtgtttcttcagcctccagggctaacctgctgagggctgaggtgcctgcagacacacagaccagcctccagtcactgcctccaccttatgttaaagataaaaataactacaaggcgggaaatgtcctagagaaactaccttgaaattcagaaaacatgaagccaggcttcatctaattaagatgacattttaaaaggggggacggggggaggcttgggtggcattttaaattgcaagctgattgtgcagcctaattttggttctgagcaaagattccagttggaccagaaaacaggacttcaaaggcactgcctactgctggccaggcaaagggagtgaaaagggcagcgtggggcctcgggcacaatgtggccgggaactctgggcaaaggctgggggccgcggggggctgcagcccttgggagcctgctgtgcctctgaggagatcagtggagccgctcctgggaggagagctaattgaggtagcgacttctccttggagagtgagctttggtccaccccagcccatcttgggggcagtcactggacagaactctggcctggtggtcccaggcatgcccccacccaagtctcccccaggagctacagaaacaggcctggttcttatgcagagcgcccagtgccctccccaggagggggctgctcccttccggggacttctcctgccagcctctaagattcaccaggcgaagaaggccagctccctccttcccagaatcccgggaggggcagccccagtccctttcagattggagggcagcggctgggcctccgcgttggtagggagatatggcagccagctagcctgggaggtggagcatctgcccccagaggctcctgcatgtctctcctttttgtgcaccatagcttatctcacaaagccagcttcactcagcagattttgtagttattgttattattactcattctactgacatagatctgggcacatgcacacaccccacgatttaagtgctccacagtcagaaagcccattccccagactctgggttctctcacaggagccctgggaggagagcatggcatgaagaacaccatttacggttgaggaaactgagtcacaaggtgtcacatgactaacccagatcctctgaggccacaccctgacacttcccacaagtgttgtgaccttggtggagtcactgcttcccacttgacatttcctggtggagacaccatggtgtctgtcttccattccctctggccactgtctcactctctctcagcagaggtctttccccagctcctccataggaaggatggtgagatgagcatgagctaacagatgggaagagtcgaaggagctggtgggcaagggaccttggttcttccatggctgccagtggggagcacggagggttccactgtggcgccattgaaagactcagcggtggatgagagggagattaggaggccagtctggagtcgctgccctcatccatgcagggaggcaggggtgtccttggaaggtaagaagaagggacagattcacaccttcctgagggtaaatgaccttgggaatcagccagctgcaggaaaggaggaagagtggagccaactttggggtccccagcctgtgtcatgggaagcacagaaatgccattggaaagaggctgtgtgtccccaaagagtggtgtgcgctttcctggggcacacaaatgacctggcagtttttacagaccaacagctttggttttagtagttttattattttagtgtatattagaaaaattagcacacaaacctctggttctgtggatattgtggcctagggtaagctggcttttttaaatgagtccaatttaataacattttcaaaaatattgagtcagcagtgacggtgacttgctgatagggcagaaagctggagaatgaggcaggaaggaatgcgatgctggagccttggatgggaaaccaggaggggagtctaactggggacacattgagttgagtctgaaaggccagtgacccagaggttaggtaggggtaatccagttgttccctgcacagaggaaaatcaggcaggatctggctcagggagaaggtggctcgggaaagcaagaaggggtttgaggactgagtccttgggaacattggcacctaaatgttgggtggaggaacaggaccacagttggagacagaggagggatcacagtggactgaggtgaaccggcacccacggggctgggcgcccagagaagaggagaagtgggcgtgatggagagggcactgcgagccctcatggagtggagagggaggcagcaagacagaaggaggaggaaggggaggacagtggcttcacggggaggccagctcagaggacgggttaggatggaggggccagagacccccacccccaccttttcatcaggtcaagtctaacttggggtgaagggtacagactttccttttggggtttccctgaagttcatgtagctggatggggctttagaggcttgggaggaagcagccctggacttggtttctatggctccccgcaggccctctcccagtcacaggagacagcccccttcccacctgcttcactcaagctcaagtgctctcctagctgctgtggggacagacaggcagggtgggctccctcttgctccttcccagctcccttctacgaggacagtggccactaggagaccagaagttaccatgacaacaaagctccttcacagaacagagcccctgggctccctgcaactgtgtccgggatatttgaggtgatcttctctcaaaaaggatgaggccccaagttggcttttagagatggggagagatgataggaggaggtagggacagattcatgttgccagctctcccacccagccaaggaacgtgtgggtgccccttcccttcccataggatgccacacactccttggggagcccaccagtgggctcattccaccttgaaaccaagaccaaggaaccaagggtggggacaaggacagagaagggagcaggaggtctgcgggcttggaagcctggactcagtggcatgaccagatcactgccgcctgcctgcaagcactgtacattcccagccaatcagggttgttctcaggcctcacaggaccagaagccaaggcccttctgctaggagaagagggaggtgaagtgacctgtttccagtcccaccacccaggggccagacccggacccactgctcctgtgcgtgccgctctgctccctcatagctgaggaatgtgcagcagtgcctgctgtgctgggtgctggggcagtcctccccagagtggagaaaggacatcagttttagctggcatgatggattaacatgttgatttttatctcaatatttatgaattcattttcatggatattagaaaaagataaaagctagcatattaaatacatcctttcccagacattgttggtactaaatttccttttgcttgaaataaatttaagtagaaaaagtctgaaggaaaatattaggtcagatgcagtggcttatacctataatccaagtgctttgggaggccaaggcaggaggatcacttgaggccaagaagaccagcgtgggcaacatagtgagaccccatttctaaaaaacaaaaaaaagaaagaaaaaaaaaagaaaaaatcagcaggacattgtggtgtgctcccgtagtcctaggtactcgcaggaggctgaggcaggaggattgcttgagcctggggggttcgaggttgcagtgagctatgattttgccactgcactgcagcttgagtaacagagcaagaccccatctaagaaaaatattaagtaaattaaagtacaagttttatacaaacagcagaaatttaatgatcatttattgagcacctattatgtgctatagtgttctgtggatacagtggtgaacaaaaattatgcgagtaactgaggcttgggagatgctgctgtggagcatgacttttacccttcttagggggagtattggcacagcacagatctctaagactccagaaaactcacctgtgctctttcaccagcttacagtcttattgagagggcactctattgctcactgaagcattagaagagggaccgtactcagtaatccacaatgcaggataaacagaggtcagatgtcaaatagggaacaaaagccaggagaagaaggacaatggcagaatgtgttagtaagggtgccctagctgctataacaaatacacccaaaatgtttcgtggttcagatgcaataggttatttcttgctcatctactagtctggggcaggtgttcttggtgggtgggtggctctcctccacacagtgactcatggaccaacaccttccatcttatggcaccaccaccccctaggattttgtcatcatgtgcatacaggagacacactcacatcttaagagccttgacccagaagtggtatgcttcattttcacatttcattgatttcaacttagttacatggcaggttgtggcctacagaaaagttcccgactagcagaccatgagagggctgaaatccagtgcaccttcccttttctaagccttacaacctgcagaaaggaactccttttttctaattgtaccggctggcttctatctaccctggccagggtgtggggcttgggggtggagatgggggagagaggcatggaagggggtaagaggagtgacagggatgaaggaaagcaagaaatgccttggaggggagtggaacctgagcccaggtggcatttggtggccctgtagtttcagagagtgagtgccaacctgagctggttccccctgcccccactgggttaggagctgcagtgccaacctctcacccagtgagccctgtgcagctcttccccagcagagggcagagttgatacccttccccacccgggcctgaccccatacccagagtcacccagtgtctgtcagggaagatgaggatggcaggggctaagtagaggccatgcaccctgatcccagacctcagagaaaaactgttggggtgatggcgccttggctggagcaggccacccacctggccctgcgctgaactgagaacccgaggagcgcgtcccctccctcctccctccctgctgacatagcttggcagatgagtccccggaggcttggctcagcccctgaccccctgtaccccaggggccaggctctgggagtcagaggagctggcatccagccctggctccactgggctgtccacctcctgccccgcccagcacggcccgctgggacctccttgcctggcccagctgctgcatggccatgggtgccactctgcctcacctgtgttttagttgacaggagtatttgtcacccttgtttttacacctgtcaccatcccacctgccgcatgtaaacactaccagcatcaacacggtaatgccggttcccctgggtgggcaccagccaagccctctgggagctgagaagagcaggtgatagcagctggagaggtcccaggggccagccttccctgaccctgccctcggggagacagggctgccgggctctgggccagctctgcccctggcttgctgatggccccacctcctactcacgggcctccatttcctctcggaagaccaggccactaaatcacagggaagcagggctgcacggggctggcgatgtgggctccggagtcaggcggctggcgttcaatcccagctctaccacctactggctgagggaccgtcagcaagtctcataacccatctgatcttcggtttgtctgagtataaaatgggggaaacgataatacttgtgaacatcaaatggagtaagcctcctggtaagtgctcgacagatactggctgctgtcatgatctcttggggcctctctttgacaccaggcccctgagtgcatgtgtgggtgtttgtctgtctatctgagtcccaaggctcacagcaaacactgaggcggccacagcctgggcttgctgtatccttctggactggttggctcagccagctctgacccctgaacccagaggtccctcctcgaccccaactctgacaaccttcctgccaccactgactttttgcaaagactcataattctggatttcctacctgaggtggtggctgtggccgaaaggcccattctcacccatgagaaggtctcctgagaatgagccgcacctctgcaggtggaggccttgccatccagccctgggatgtgctgcatgggacggtctgcccagggccttccaagtggggcacgtgccaccgctctgtgagatgagatggctcagtgggacaaggctcacacatttaatagcatgggctcaccgagtcagaaagtggttccttctctctcagcttgtctgagagcctcaaaaagaaagtctcaggctggtgcttggaccttcataacacctctgaacctatctcctaggtcaacaaagagagcaaggcctcaagcccagagccttctacaggcaggggatccagagaatttagcatcctattctgctctcattgtagttattcttatgggtgttttctatttaaaatactttatacaagttcttcacttatcatagggatatgatgtttataaggtaaaaagatgtgtctaggaaaaatagtaagtattactcattcggtgatgcaggactttggcagaacttatgaagatattagggtatgatgcttgggaaagaatgctcttgtccagcagctcttaaacattttggtttatactcctaaaaattatcaaggaccccagtaagcattttgtttatgtaggttatatctatcaatttttattgtattagaaattaaaattaaggaaaatttaaaatatatatttatttgaaaataactataagtccattacacattaatataaataaaatttttatggaaaagtactgtatttttcaaaaatattttagtaaggagaatgtcattgttttacatttttgcaaatgtctttcatgtccagcctgatagaaaatggctcggttctcacacgtctctgccttctctctgttgtgatgtgttgtttggttgaagaaaaatttggccccacacgaacagggaaggagtattttactagccttttcagataattattctttgaaactcccaggacttggcaaatggtagtttattaaaggagagttgcaatgtggaatctgaaagtatatcaatgacccttctttttttactttttttgagacggtatctgtctcgcccaggctggagtgcagtggcacgatgacaactcactccagcctcaacctctgggctcaagcaatcctcccacctcagcctccccagtagctgggactacaagtacacaccactcccagggggccaccatgcctggctaattttttttaatttttatagagacggggtctcactgtgttgcctgtgctggtcaatgaccctttcctgttctgttacattaaaattcactggcctaccttgcactttgaatggatctcttactatgaatgatttttaacaccattttggtcatttggaaaatattggttcatgagttacacagatctgaatgttgacacatttcagcatattatatcaaaaactcacatttgttaatatcaacactgatctttgagaaaagctttaggtattgggaagttaccaagtttacagtggtaaacacaagtcttccacaattctgcattttcacttgaaagccagaattttataattttggtaacaaatatgtcagtggttttctttgaaatcgtggctcactggttcatttttgggagaacttctgccagagaccccagtctgaaatcctactgcttgccgctcaggcttttcaaggaaaagcagtgtcccatgaaggaagggatgagtccggcttgcaactcagcctttccccagtacagccgccacccttacatttgcagcacgtgttttgtgcttacttcccatgtcatcatctcacagaattctcagacgggtactcgagtggagttttttataagtcgtaatttttacttcttcaccaacgacattcttcagtccagccagcatttgctttcttggcatgcatggtggtagggagtgcaatggcagctctgcagcccggcgccgagtccagcgccggcgcctggcttctggctaaggagaccacgattgtatctgctgctgctacttttgcaccatccgtgcaaatgttaacactgttaggaaggcaagtgacatcttagttttgttatgaaaatagttttgatttcatggacccccttgaaaggatctcagagacccctcggggtccactgaccaccctttgagaaccgctgatctagccaatcccttccttatgcactagggacactaagaccccacaaggagaagagacttgcccagggtcccaaagccagtcagaggcagagtgacctgaagcccaaagctctgagatcctggaagcaacgtgatctgcaccttttctaacaaaacagtatgtgcccactctgatgaatggcacaggagccagtgtccccggggaaaggatgaggaggcaagagggatgaaccagcctggggataggcaccagttggccaaccctgtcaacttcaggacttgcctattcccaccctgcaccttatgtgtagcgctgcatcttccatcttttctcttccatagctgtgttgctaatgtctcccagccgaggcggctgtaattaaactattcaccatcgtcacttcgtgttctgaagagatgaggtcggccattatcatttttccttccctttgactgagctctgtgtgggtaatttcattctgccttgttcatttcttagaaattttgtctatccaattttagttcttttttcctcttagaacactgggctcaggggaaaggaggtggaggatgagggcatcatggatttggaaatttctgtcccattcaccttaaagcttttttgggacaggatagtgcctgcttggtggtgcagctatccagagagcccccatccaggagagatacccaggaggtgtagaacaggggtctggacccactgaggggagaagggcaccaagacaaagaggcaccacgtaaggctgtcccagaggggcagtggttggagctttggacagacagcgtccccacccctttcctggtggtcagaagccttgctgacataaaaacccccctgcctctgggggcccaggacaggcttctgttgctaatgaaagtgagcaggggccaggcacagtggatcacacctgtaatcccagcactttgagaggccaaggcgggcagatcacgaggtcaggagttcgagaccagcctggccaagagaccagcctggccaacatggagaaaccccatctctactaaaaatacaaaaattagccgggcatggtggcgggcacctgtaatcccagctactcgggaggctgaggcaggagaattgcttgaacccgggaggcggaggttgcagtaggccaaagatcttgccactgcactccagcctgggcaacaaagtgagactctgactcaaaaaaaaaaagagtgagcagggcctccatcctgcgtttcctctccccggcgtgccctgccaggcctccactagctcccctagggcccccatgcccactctacacagatgctggcagggctgacagctcccctgctcctgcaggaagaggccaggagcccacgccacacagaaaacgtgaatgtcccaggccccaacacatggaaggcctggcatttcctctgccaggctctatggggaagcattttctctccatcagggctgccccaggatggacactggcctgcccaccaggggtagggcaccccctcataggcatgaccagcaacctggccgagaggctgtctgtgcttgagcccctgagccatctgtgtgcccacaggtggctgtcctaagtttaaccttctagggctgcatgaccccactgctgtcctcaggccctgctgatggctgccagagcatctggtgcctccaggacccactcttgcccgtcaaggccctcagtgttgcctgggtctcgcctcacctctctttaattccctcctcacctcccgagaagccccatgtctcccaccatccacaaacctgttcctcctgaggcccagaccctgcctccctggggtggcctccccactccccagctggtgctgatggatctgacgcccctagtggactgcaggcacgggcagggcagggtccagttcctgctggcagttctgtccccagcactcagccctgggcttcacacagagacgtcctccaatctgtggggaaggaagattcttaggtctcgccctggctcctgcttaactgtggccagggccaggagtgggaaactgcaccagccactgacaggtggtttctgggtgaaaactttcaggtgtgcgggaaccagtgacagggcctcagaggacttgggccacagtcgccttcccaccccctggcccctggttctggaaggaacatagtaagcagtttctgtctaggaaaaacctgcttctcagtcattggaagatccctgagttctgaggctgaaaaggaaagaaagttaggatcaaaaaacccaagccttctttactccacaggagacatcctgggtccaggcagggaaggttctcagaaaggcttaggacaaatcctggggcatccagaaggtttgaactgctttctgaacccaggtggggacttcaggaacgccttgcttaacacagtcacagacccctgacacagaagggaccatgggacagaggcagggaaaacctcaggggctgctctccctccaccccgatgtgttcaaggcaccaactactgagctggggagattccctttgtcaaatgttaaagtccttaaggcccagaccccactcagtgtctgccacctagcaggtgtaaatggatacatagtagatgggtgaatggatgagtggatcaaggagagaatgaatgggtgggaggcgagttggatcaaacaggagtggatgagtaactaagggatagatagatgccagggaagagtggaggggatggtggtgggttggaagggatgtgagtggatggatgaactggggtggctgatgggtagatgatgtatagatgggtaggtgcacaaggtttgataggtaggtatcctgggtaggtggtgcaggatgtgtggctggctggctggagaagggatgatgggtggatttgaaagaagagagtgggaggatcatcatcctaaatggagaaggaaagcaagattagagatggcactgaatccttggttctgctgcaggatctttttgaggaaccaggaaggttcccttccctaaagcaatggtgagcccatgaggtcccctacctcctcaagagaccctgtgagctgaggacgttctgtaggcgcaggccttgctcagaatcctaagcccaagcgaggaaagagccccagccgccaaatgcctgcagcaccccagttgttgccactaccaaagactggtcacaaatgtctaacgtgcgcccggggtggcaatttggtaccacttccactgagagtcacaggcagagagccatctgccagcccaaggccaggaaagcagacccccgccccggaagggagtgctccccactgttctgacgcccagctgcagagagggaggggcggggggctctctcctgtgccggagagaacggagagaacgtgacggtgtttcctcagatgtgcaggcctgggtgggagcgctagttactaagtacccagaattcttcgccagctggaattgtagtggccaggctgggcccccccagcggctggggtctctctgccccttcgcgttgaagagcaagtcggcagcccaaggaaggcgcgatggccgccgggcccggccctgcaatgcctggtctctggctcggcgggtccagctcacgctccctctcccattggcctgtgcactcctgccccctggtgggtacagggacaactacagtacatggggcagggtggggccagatggaggtttttccctgcaactggaggactgggtttgtgtgtgtgtgtgcgtgcgcgtgcatgtctgcagactcacacttcacttggcctaaaagattagagatggaggaaagctctgaatgatccaaagcagctcctcaaatggaaggggttattattataattactatgattattgttatcaagattatcatgcttgcctagaaagtcttgtacaaagcaggcttattttgtgtcagcttgttgtttgtgtctgaggcatttcatctttgcttataataactaacattggcaggcttctttcatgttgcaaagctgtgtcacatcctcaccccgttttatctgcacaaacagccctgtgcagtggggagtagtgagagaacagaggctcagaggttcagtgttctgtccaaggtcacatggctaaaaagatgcagaagccaggatttgaacttgggtcacacaatgaaaatccctgttcatttccccatcatatccttggcacctcatcccttgagagggaagaggccttttattaagctttagctccaagcctctttgccactgatatttgctgaaaagcttacattgccatgaagagaagggaagggttttgaagactcaagtgttaaaagtgcagtttaccatcccagtttcacacaaagaatatacctgggcttttccaagtccctgcagtacctggggtgtgagtggagaatgaggtcttctatccttttcgctcaggttctcttggtcaccaccaccacccctggggtgtggcacaggacagacaggcatctgctacatctctgagaagcgcggaagaaggtgctatgacaggagaagctggtgcagggggactgtctgtgtcctggtgggtaggagctgggtacacagggggcagggccctgactgggctctgggagcctacgcccctccttggagcatgggttctatctccagggaccagctggctgactggagagagctttctggaagcagcacccctacctgctgcgcaccatgggctgttatactgattgtcaccagggtgctgcttccccagcacactcgtgaccagccgccagcagcacatgtcctcgtggcaggacacagggcctgtgtgccaggataagggaccccctgtgtaatgccagttccggagcatcactaccctaccacctcccaggcatcctgctccccagcaacagcccaaagcaacccacttctggggggtacctgtaccatgctccccacccctctcaatgctggaatgtcccctgggccctgtctccacaggcctcttcctctccttgcccacccctttctccagctgctgacaggtgccatgcaaaggtttacatagggggttctctggagccttgagcttccccaaaagtgcctcatctccactgtggcagctttgagccatttatttgtcaacattaagagtgagatatcatttaaccagaaagattgtactggttactatgataaaaatatgttcatgctgtctttaaatcattgatgtggaaaagagtcctgtaggtggccttgagaaatgacaacctctcctggcctcctgatcctaaacccataagaatggcatctcgcttactgttagcattcagaaatatacagtcccagccatgccccatagaagagtcccatcctcctcccgtgtgcccaatcatcatgagggtgggcgggttgctcttatctctatgtggcagccctgggcagcctatgacgtggagccgtgtatactcgtccactgggtggacagcagcgcagcccacccctcagggccatccctgtgctaagtgccctccgtttgctcacacaacagccttgcagagaaaatgatggtgctgtcatccccattttgcaggtgagaacactgagcctcagaaagatgataccccttgctcaagctggaagctaaagctggagctcaggtctgggtagctcctgaatttacagtctgaagcccgcagaaagctgcatggagcagcactaaaagtccaaggagggagtgagcaaaggaagctggcagaggaggctcctcgaagggtgtggggtggcaagagaatcagatgttggattccatggtgggttccagcaggtgcggaatgatgaggtgggggcattctgggcccttaatgattacaaaacccatcccacctgcacctatacatccgaggaaatgcagtcaggttttccctcacacacacagcagagagccccctcccttcctctctgtagctgggccttagaaccactgtaactgggacagtggtgggaagagggacccactccttcatgcctcaggcagacatgcatgtccatgaactccttacaggactgcctgctactgaatcccccagactgcctttagtgtgcagcatgtatgtggccagtgctcacaacacagctagtgccataccagtcccatgggagagagaggggccacccacacaggaaacaccacacggcatgtgggcactgtgcacggggtgtggtcagatagtaagagaggagcgggctcagaagccaggaaagccagtggcgctgcaggaatgggagggggtcttcctgcaggaggtaggccacacattagccttggccgactagggggcataataggactatttggggtacaagtgcaaaaataaaccaaccaaacaaacaaacaacatatcctccaatggatttttaaaagcaggggattgattgactcaagtaactagaaagcccagaggtctctgtggctgcaggcgcagctggatccaggcgttgacatattatgactcaggtgcctccctctcagctctgctttcctcagtgttggctgcacactcagagggggcctccctttgagagcctctctttcctaatagctgctacaagtgtcctggggctggctgggactagagactgattgttagtctcatttgacaaatagggattctttgtccaccccagactcttcacaggccagtgagatgggttggccaagcccagagcatgtgtccacccctagaatcaggggagatttagctcaacgcagaccactcagactgggctggagaagggtgcttcacttctgggaactggggctctgctgccgtaaaacaagagaaaaaagccacaaaggcagagagggcagctgcccaggagaacaggactgggcagagaggagcgggcaggccttcactgccacctggtagcggtcactgctgtctctcctgcagaactgcctgggcgggagcacgcagtgagttttctaaagaagtcagctctagccgtctgccccgcgtaaaatactcacaggccagacctggtatcttcatccattcaggctaccatagcagaataccataagctgggtggcttatacacaacagaaatttatttctcacagttctggaagctgggaagttcaagatgaaggtgctggcagatcactatcaggtgggggctactttctcttagacggccccttcttgctgcgtcctcacgtggtggaaggggtgtgggtctttggggcctctcttataagggcactaacccccttcctgagagctccacctttaagacctaatcacctcccaaaggccccatctccgaacgccagcatcttgggggttaggatttcagcataggaatcttagggggacataaacaatcagactacagcacctggtgagtctgcccagagaacatgcatgtgttttgtcacatctcatatggcctgggcacccaggcacgctctgaccagcaagaaacagcagtgtgatggggccgtagcagaaagaatggtgctagaaaatacccaccacacacaacccataggcccaggaggagccttggatgggaaattcaggctcagcctgagccccgtcccccagacccctaaaagcaggcagacaaaggagcagggtctcccctggctctagtaattgcttgtgaagcccaccatccttttttttgtgctggcaaagcccttccttcccctcaggcctggcccttctatcttatgcatctcccttccctctgcttgggggctgggctgggtacccgttagttctcagcttgggcctcaggtggccaggccttgtctgagatgtgaagtccagagctgctggctgtggcacaagaggaggtcgactttgagtccaggctctccttactggcgatgtgatctttagcaagctccctcgcctaagcaggatacccacctgccgtaatcattaaatgagacacaaactgacaagagctggaggatagataggattgagtgagaaactggggccaagcctcatattaaaatgccaaggatccatacatcctgcagacgtggctgagcaccaactctctaccaagcacggtgtgaggcccaggtaccatgagaaatcaggaaacgatccctgccctgaggaccaggctcatacagcaccagctgtaccatggtgttgctgtgcgctgtgggagcagggaggtgggcttccctaaggaggtgacatttgagatagggtgggactgagaccagagtgatctggacagatggagcacccagcttatttggggaacaggagtaaggctgtatggctggagccccgtgagagggggcaagttggaggatgtcaggacagagaggcagtcaggggctttgtaggccccaaggagtctggaatgcgggaatgatgggcagctgttgaaaggaagagctatacccattatgattaagtttaactgaataccagaaactctggaaattatgccttaaataagatagaaattgatttaagtattaagaaaacacacactgaagatagtgtgaggatgacttcagatagtgtggagtctgatccttgacctaggctgtttttggatcactattccactatccctagggtgttgaccttgtcttcatgatcccatttagttgctagagctccagccatcacatccaagttccaggcattaggaaagagggaatgagagaaaaagggtgccccttacctttaaaacaacctttcctgaggccttacttcacttcagcttacctttctttgtgcagaatttgtcacatggtcacaactagctgtaagcaaaaaaaaaaaaaaaatccagccttttagttggatatcagtgtgcccaaccaaaaatttctggattctttttgtaaagaagaaggggagaattgatgttaataggaaactaatggtctccttctgtgtggggagcaggctgaagaggagaaggaccgaggcagggagcccatgggagggaaccatggaggcctggacttagaagtcggggaggagatgaggaggagcagacagctgaaagcagatctgaaagaagaactgcagggcactgggcatgggaaggactcagtgaaatcaagcaggtctcctggtctttgaatttgagcagttgagccaatgtggaagacaggagagagcgggaagggcggggggccagggggtgttgctgccagcacaggacccctccccgtcccacaacaggaaggcctagacccctgggctatctgctggagaatcccaggaaatcatttatcccagatgtccccaaactgtagaatgcatcctactggagtgggacccattaaattccaggccacacatggaagctcaaacatgggagcacagtagctttgtggcctcggtttgtaaatcacaccgtcttgagtgtcctcctacaaagcctgttgtggctccagggcccccacattagcgtgtgatcctcaggtccagggaaggtcttgcctcgcaggcgtccccaaccctgctctcaggtcctgacttgttctgactcaggtgctccacagatctacagaaaccatgaaggtagggcccaaagaaggaagagttggaaaactcttgccaggtccaccacccgcattcctcagatgggaaagtaccccaagattgcccgaggtcagccaggcgtgaggagcaggatcgctgcaggtccctgactcataggccttgcactgtttttagccccaggtggaggcgccacccctgctcacccacctgctgctgccctgagtcatccctgcctgcctggggcacccaaagcccaggccccagggctggctttccaggtcactgctgccaggggggcccggacagccttcatgcccagtgagggcgaagtcagaccccacgggctgggttgttggcgatactgacccttggatgctgggtcaggtcagcatggggacttggccttccagcctctgcaccattgtagcttccttcccaggacaggcaatgggaggggcacagcttccagaactttctcactgcccttctgcagtggacaggctctgacatgtaaatagcactttagctggacagctcaattctggaagagctttggcctcacacttcttttgtacagacctttcgttggcgacaaaacttccagatgctgacctcattttctttgtgtctctcccatccccaaggatgcctgcagactttcagtacctcccactcacttctagagccacgtgccatgggctgggcagtcagtctctctcctccggcctaatcagagggttgggagttgaaggggtttgcggcagaaaaattatctaataataatactgcatgcagctgggcgctgtggctcacgcctgtaatcccaacactttgggaggccaaggcgggtggatcacctgaggttgggagttcgagaccagcctgaccaacatggagaaaccccatctctactaaaagtacaaaattagccgggcgtggtggcacatgcctgtaatcccagctactcaggaggttaagccaggagaatctcttgaacccaggaggcggaggttgtggtgagctgagatcatgccactgcattccagcctgggcaacaagagcaaaactccatctcaaattaataataataataataatgcacacatgaataaaatatcccaattctggagagcccgtgaaatcggggagatggtaggcctggtgtatgcgactctcagaccccagtggggtctcagtctctgttgggctccaggactcgtgcggtctgaaaccagggggaaggcggctggaggaaggaccccagctccctgcctccacctcctccagtgctgagcatcttgtcttgggcctggtagtagtcagggtctctgtgagtgcaagtggcagaaactaacgggatagggctcacaggacaggtcacatgaagggtaaagggacccagccttggggacctaaataccatgacacttccctgcttctttctggtagctttattctgagagtcttcttcatgggttgggggacgcttgtctcagtgatactagcgactctggggccacattctcctaagcttcccactttgaaaaatcccagggaaagactacaggtggcccagcatggtcacatgctcaccagccacctcctccactcatcgaccctcttccttgccttggcatcccacacctggttcccagggcctggcatggactggaagctggcctgggctccacaggactcagggtccagcacactcctgtcctggccctgtgttcccagccatgcctcttcctgtcgctgggacatctcgcagtgccactctgctggtgcacaccctgaggcgtggtgccccaggcgggcagtagtcactaggcaggggtgttctcaggacctgctaggattcagccaggaatagaggggccactcggatggtggttaccttgcattttggttaggagagtggtctgagcaaagtcctgtcagccacagagacatgtgaagagcaagaagacagggtatgtctggtgcctgggctgagacaggggcttgctgtcctcaagacagcttctagaggtttaggttcctttagaagcttatctgagaaaaggatttgggtgagacaaggagtttatttgggaggtcatttcaggaagcaccgaggaagtggggaagccacacaggaagggagggaagccatgaaggggagctcatgggtggcctgccacgttggctgctggggctccatcccatggggatcctgtctgaatgtgtagcttgtctcagaattgcctccctgggagggcaaggaagccgggttatttgcccattcctgtctgtccggggcaccgactcaaactgcagccagctatacacctgaggcagtgagctccatgggcagaggcaggagggcggcccggggcagcacctgctctgctctcacctactctgcgttggacattaaaggctgtggctgcctcagacggagcacatatcttcctgggcaaggccacttcagctgtggtctagacccctctaccaggccctgtcagccgtccagggagctctcggcacaggtgggtctgatcatagaggctgggcctggagtccgaaggcacctcatcttgagtcccacccctgccactcaccatcgggttgttaagtgagtgccttcctctctgtggccctcaatttccccactatgaagtggagatggtaatactacagcaactgctgtattagctgtgccacagcaatgctgtctactgagcctctcctaaacccagccacttagttctgcagatcagagacccagggcaggctccactctgtaccaggctccccgagtcctcttcccaggatgaatgacagagcccgggcgtattcatggcgatggcagggcccacgaggaccagcagaaacacggcctctcaaggagctggcacagtgccactgctgcaccattctgtgggccacggcgagtcctgtgccatactcaacatcaagcagacaggacatatactcagcctttagcaggaggagctgaagaggcgcagggcaaagggtgtgggcagaggaggggtgaaaggcccaacgacacagctcttgccactcgctcctgaggtgggggaggttctgaggacggagtgtgttcaccaaatcctttgtacgctaagtactactcccgtgtgcaaggtggcggtgacggtgcagtcctgggatgtctgcaggagccttcttatcttcaaagaccaccacactcctggttgtgatgttacatgcatgtgattgtagtctttgaaaaggcgaccccactttggtatccaggatgaggggaaggggaagaaacctgttaattatgcagtactttttctgtaatttcaagaaggctcagcctacacgtgtgcaccttaagcaaattcatctacacccactcagacaaggaggaagggaggaggcagaggaggagagtgctccaagctcattacctgtcctttcccatttccatgtttcacctgacctaggagcttcccctgcccccagagaaaggtaggccccaggtcacaaacaaatcaagaaaaattaataaaatggacttttggctttgagcagtccaagggccaaagttcttgagatttagtgttggcatgagatatttttgccatctgcactaacttggcaaccagcccctcccctcccccagtcctgaggcacagccccgctgtggcccatccctcagctaaccggaattctctaccgaaacgtctgctcctctacatagcccagttctagggactgcattccaccctgtgtaagaagtatagaaaattacagctcagccaagaacattgatttttttctcccccgaacaaaataaccgagttttcaggatgaaagcagagctgctggttgagttggagggtggagagcagagccaggcccactctgccttcctgctggttgagttggagagtggagaacagagccgggcccactctcccttcctgccccagaaaactctggggccccatgggctgcagcttggagctcctgctttaggacatccatgtggtagaaggccccacgggccccaggaaccccaactgtgcatgctcaggtcgtggccctccctggagcaggctgtgggctgagctgcggtcctgctgcactggctgggctctcatcacagtccccgctaggggagagcccttggctggcagaggtcttctgtccccaccaaagcgtcaaagcccaccatccacctctcctcacaggctgacgccaagatggtgtgtgatgtggtgagtcggatggaagacaccgagcccttctctgcagagctgctttctgccatgatgcggctctggggcgactcaggaatccaagagtgcttcaaccggtcccgggagtatcagctcaacgactctgccaaatagtgagtgtcccagcgggcgcatggcctggagccgggcagtgatgcgggagtggaagggactggtgatggggattggcagagcaaggaggattctcggctgaggtcacgcctgccgggagatgttctcccataggtagagggtgtcaggaaggaatgagaaggggcctctcttcctgcaccccaggaggagaaagaggccagaggaggcagaggacgcaagagacaaccaaacagtggaaattcccagagggccgggaccttgtcactggcttgtcctggagagtgcctggcactgcaaaaagacagctttcaagtgtagcagctttgtttttttatagggagcccctgaccgcataaatacaaaccaaaacaacagccatataggcagaaaagaaatggtgccattttgttttattttagaaaaaataataagctttccattccccatctttaaaattaagaataaggaatatgtaagtctaattaatataataaatgtatactttaatactatttataactaaataagggggatgacaggagggcaggaggacggaaggaagaaaggaaggggagagagggagaaagaagaggacagaagagaagacggagaggtgggaagtggtaaaagctggagctggttagaaggtgctcccggctcttcccatcacagcaggtcacaggtccactggctgcagctttatcactctaggcatctccaaggacatcctcactgcttccgtgcccttggcctctagattggaggctccagagccctgggatggtcagcgttggtcagggacatgtcttctgtcatggagatactgggattgcccccttggctttcgggaaatgcaccccacctttgcaattgcaatctggtacccatacattcagtgggggctttctgcaaggagcccttgagctttatcccactagctgggaagattctgacatgatccagtccagccattttcaccaggtctcagctggggcctttttgcctccaggggacattcagcaacatcgggagacatttttgatggctgcagctagagtggtgctcccggcagctagcaggtagaggccagagatgctgttaaacaccccatagtgtgcaggacggcccccacaacaaagagttacgtggccccaaacatccatagtgccaagattaagaaaccctgatctacgcaatgccaatggacagaggctgaggccaatgttcactcctggacatttccacgggccacatggcagccaacagactagggacttgagcaaggccgggagcggcttcccatttctgcacacctagattgtccagagggcaaatgccgaagtcctgtgagtcccaggtgatgactacctaggcccccgggcctgatgagctcccagggacaccctggtggtcagggcagtgagcccagaagctcagtgtccaccattccgtatgcacaaatcacagaccagagctaggcaggagagagtgactttcagctgccctcctcccttcttccactccctgtccctgccctggagtccagggcctcctccccgagggccagcaagaccctcaagggcctttagggccagctggcccaaatctgtcttctagtggctcagcaaattctgctctccacttacatttttacccatttcactaattataacatgaatccattaccaaaaaaaaattaaacaaatgcagagggatgtaaaatgagaagtaatcttcctactccccccaccagccctgcccctcccacttttacccacttccatttatttgtcccagtggcatccagaaaaacttgatcctctgactcaaaatagtatttactgccacccactctggaatcgagggagctcagctcaccttccttccttccatcgctctccaccttcacctccggctttttgctagttacaggattatttttagttcttccggtgcttacctttataactttaaataagaaacttgagtcagtatttgtcaactccccaccaagtaagctgaggaaattctcctccctgcagcctcatctctgccttctttcaaattttccacttcccaggttgatgatgttaccattctcttctgtcactgtggctgggccttccgtgtctcccctctgggagagggcaggaaagacaggggacacacaggtggccagggccggaagggcctggcacatttcctgtcttagcagttagacctcagcttctgacaaagtcttgggcccagtatagaaagcagatcagagtaggtttgttgtgctggaaaggagagggaggactcacagggctgccacagcacgtgcttccagggggtgccattgacaccctaatgccccaaccaccaaagcacttctctgcccagccctttacaggggagggaccagggcacaggctcctgagcaggctcttggtgcaccccggcctctgtgaacagggctggctctcccttctggataactacctagaggcaggtcccagaaaccctgggcacatccaaccaggggctgtgaaaggtgctctggggcctggttggcattggctttcctcaaatccagttccccactgagttgtccatgctggcgtccgacgtttcctctcctcaccttctctcttgaccccactcctatcgagctcttgctcctccgcctgctgagatggctcatagcccagtcctatcctgggggctgctccatcagcctcctcccactcagggttcagggttcagtcccctagtacctggtacctcctttcactcccagcccccgcctcctctcgggccgccctttccagactccctcgatgcctcctgcccacccacccaggcaactggtgatgggggaggtctgctgggggctgctgtatcccgtccccaagctccatcccagaagcacctcctctcaaggcctggtgcctggtgaccttctcctgtctcgttttaaacaccttgtacacttggacaactctcaaattcatatcgccagcccagccctccctcctgacttctgcctactcagtgcctgtttggacatcaaatgagtctcaagttaacatgagcccgtggaacccctggctcccatcctcccactagaagctgctctgtgtgctcctccctccctctaaatgtgtctcattccaccacgtggaggtatctctacttctgctcgtcctcctgtatcccacaccgaggccaccagcagatgcagctcccctggcaggtacatcagattctgaccactcacaccctccacagccacccccactgtgccagtgccatctggtgacgacagcagctctgcaggccccacccgctgacctgctctcatggcagcaacagggccgttgtcaacatgcttctggccagaaccctcgaggggctcccatctcactcagagcaaaagctcaagccctgacaatgacctcaagggcctgcttgccccagccggactctggccaccctcacctccaccaccttccccagcctcacccaccacctggcccctccacgtgtgcttcctgccgccatgcctgccagtgtttccactgggccactcgaggcccacttgctccctcattcccctcagtctcccctatccagacgccttccccaaccaccctgcatcaaatagcagcccccagcagctctcccccatcactaatagcctgattcgttctctcacactacctcctgacatatcatctctctgactcttctgtttaccacctcacacacgtgtgcacactcacttggaacacaggccctgggaaggtggggctgtgtcgactgccccatccccagctcctggaacagtggctaggtgggatggacagcaggtgcacagtcagccttcccgactgggttgttaagcagttctcccacaccttgcccaccctccacagccgtctccttgcatgaggctcggccagcacagagaggccagagggccaggttgcccatctaaaggaggtttgccctggctgggaaaggaagagcaggaccaaacgcttccaggctggtgtccagctgcagatgacagcagagggcgtcctcacagcttggaagcagaggtcatgggcgccagggcggggcaggcacagaggcttgggagaggctccttctggctgagaccagagcctgcccagatgccactggctggcgaggaggctgtgaggccgggggcgtgtacaggtctgctctgcagcctcggctctctcaccccatccccacaccgttcctgtccacggagggcagtcaggctcaggagaggaggccaggagtcctgtttaaattttttttctggatttttaaaatgctgatgatgtccagtttaagagcgtggggtctggagccagtcagaactgggctggaatcccagccaagtgcattttctttttttcttttttttttttttctccccgagacagagtcttgctctgtcacccaggctggagtacagtggcacgatctcaactcactgcaacctccgcctcctgggttgaagcgattctcctgcctcagcctcctgagtgctgggattataggcacctgccaccaggcccagctaatttttgcatttttagtagagatggggtttcaccatgttggccaggatggtctcaaaatcctgacctcatgatccgcccaccttggcctcccaaagtgctgggattacaggcgtgagccaccgcacccggctgccaagttcattttctcgcagtgtgacttcaagcttacctccctgagccttggaagccacccttctgttttcttttcttaggggcattctcacaaggattgtcactgggttctatcagtgaacaccctagctggcgaagtcatctgccctttccagccctgtggacatccatgagctggtcagcatgcccatctctcatgcagtggtaactgcaggtccagccagcaagctggcccccagcaggtcctggagcagatgcagcctgggaccccacatcgttctgtggttcagacacttggggctcctccctgtgggctgcttgtggtttgccccggcagcagggatgggtggcctggcaggctccatggatcactgagtcttccttcaggcctggcccagctccccacttcctgatttcccagatcctaccctggctttaggttcaaacttaacccacaatgaaccccaaagcccttgcaggcagcgtcctctgagtgcttggcctgaggcctgggcaggtgacttgcaaaagcctggtctgtccccacagcaggaggtagcaggggtaaagagccctgattccaaagaccgggtcccagggaggcccagccgctgtatggctgtgcagccctgagcctccaagagcatcaaattggaaggggcacacagaccccttggtaagtgagaaggaagtgtggagaaggcagggaactgctcaggggccgctgaagccccagacagtaataaaattatggcctctggagccaagggtccgggtcacagcctcaggcaaggtacttaccttcgatgagccccagttttagtacatttaactcagggaaattacacatgaaacatggttacacatgcaaagaatagaacctatctgttggccattattatcttttaaatgaaaaaatgacaaaacagtattataataaacatggtagtctcatataaaagcttgatcttgtctgagtgtcccgggagctgcatgcgtagcccttttggctgtgaatgagtgcgtgaggccaagacccctaagacccacttcctcagtcgcccccactccctatggcctggaatggaggtgatgtcttttccacagtgacctggaggggccctgaccgagactggactctgaagatgggtggcctggccagtcccgaacagtgtccaggcatttggtccatagtcccctgtttgttgccatcctcagctacctggacagcctggatcggattggggccgccgactaccagcccaccgagcaggacatcctccgaaccagggtcaaaaccactggcatcgtagaaacccacttcacattcaagaacctccacttcaggtgaggcccagagaggcccccaggccctggcgagggctaagatgggacatgcccagcctctcagcgcattgcgtttacagcgcccaaacatcatcctgccccagggaacctgcgggctggggcaggcagctagatactagaaggaacctgtctgtgtttctgccaaggttaggggctggagtgagcagggaggctttctggaagaagattcccagagtggggctgtgaggaacagggaggatttggacaaggaggggcagcctgtccctgaggtgacttccaaggaggaggaggaggtgggctaccagggggcccttccaaggtcaccttggggggaggagccaagagtggggctgggtaagcccaagctacctctgtgagaccctgaggacccaagtaatcccagagctggaaggagcagagagagctgacccaccctctcctagtacgcttgggaagctgaggcctgacaagagcagggcttttcccaggcacagagcacagctagaacccaggggctctggggcctcagagcaggggcctgacgggtgagctggttcccagggtcctgctgcagcgctgtgtccccacctgcagtaacatgcgtgcactgaggcctgctccgtcctgtggggaagagaggccagcagagaaggggagggcagggacccctgctgggagagctggattctaatattccctgcctcccatgtccccaactcctgcccgctcctgttcagactgaggggccgaggctctgggcccaggaacccctaggcctccgcagatctggggagcaaaaccttgggcagagcagccctgaggggcctctcttgccttcccaggctccttggtctctcctgctcccccactgggagcacaggatggggatctcagctcaacccagcccagcaaggcggggtctgagaataagcattctggaggggccacagaggccatctgccaacgcccctgcatttcagatggggaggtgggatccaggggaggatcccctgattgatggaatgagaaccagacccattccttgctctgagcccacactaatctctgcctgcagtcactccgttgtgtccggtgggaccagagatccttccctgtccccctctggcaggctgtgtgtcagcaggcatcccagatctaggaggctacaggactcctcgctctggggattggggtgggagactgaccttttacttccaggacgtaagtcccacctgcccacagtctcttccagaatttttgtgccccctcgggagtagagtctgagagggggaagaggccaggctctgatctgccagaaaggggccgtactgggcagaggtgagagcgccagctttgtccacagccagacccagctccaccacagctggactctcgccagcttgggcatgtcctaagcccatgggtggctcacttctgccatccacataacaggtgacatctcctgcctgcctccctcccaggctggtttggagtttgcccagagcaaacccaggaaggaatagactgagaggagggtcctcatgcgaggaggactctcagaggcacttcctgggggtggctcaggtgcgccctcttagtaaaatgctcctcagatgcaagggcaggtctttgagtcatgatctgtgagcacagccagtcccaggacagactccaggggtagtgcctggggatggcagtgatccagctgtctgtcatcacctggagtgacaaggtcttctagtgagggcttttagcaaggctctgagcaccatggcccccatcctctgcctctcagcgtgctcacagcttaatccccaggcagccctcacctgcctggaccctgcgcctaccagctccctgcctcctacaggctgtttgacgtcggaggccagcgatctgaacgcaagaagtggatccattgcttcgaggacgtcacggccatcattttctgtgtcgcgctcagcggctatgaccaggtgctccacgaagacgaaaccacggtgagtggcctgggccccccgggcagggggcagcgctgaggagacggccgcaggataggccagccctctgagcactgggcctcgggtgcccacaatggctctggggtccagccagctgttgtggttagaggtttccatcatggacaggccgtgccggcactccaccaattctgtattgccaaggcaaatgcctcatgatgccagtgtggcagagcctgtgtatgcaacctgatcacacagagccgtgcagaatgtgcctcttccataaacttggtggagtcacagaggccatcaggccatagcaaatttaagcaaaccctaaaaaaaccaggaggcagccaagcaagaatgtacaggcaacagaaatagcagtcttagcctgacagccatccctggggcactggcgtcagatgctgctgaagcagcatggggccggggatgctgagggagaggtggggagggcccaggatgctgcaggagagttgcgtggggttgggggtgctggggagcagtgtgtggggctgatgggccaggaagggcaatggggatgaggcatgctggtgagtgacagtcgtggctctgggctcctttgccaaatgccagaccaggctcctaccttctgtcttgcgtcacattcagcctagggcctcagtgaggggacattcccctgggagagtgcagccttcctctgggtctagtcctggctctgctactcactggcttgctgctgaatttaggcagcaccctttctggctcagttactattttccataaaagggagataataatagtacctgcctgtggggggctgttggcagtggggtgggtgatgcgtgtgcagcgctctggagctgtttctgggacagcagcgccaagctggtggttgtacagttgctggtgattgccctgagcctgcaggtccactgcgtggtccccttctgggctgcagcccgccaggcaccgagcatggcccacagggtcactggagacaagccccaacactcctgacagcggggcccataggctatggggtcacagcctggcgtctgtcatctccttctgtctggaacacatgcaaatcccccaccccacgcctctgaaggctggcaccgagggtttgaggttggaggtggggcttgttgtcatgctgggccttgagcgaggcctgtcctctctctgggtctgtttcctcgtcatttctggcccagctggtccactgggctttgtgaggatgggatcaactttggggtgtgggctacggggcacagtgctatagggaggaggagccgccgccctgaggggcttacacagagtgatggggctttgggctggtggtgtgggtagtctggacccgttccgtgtacaggcttacccacctgactcttcctatttcaggcccacctgtacccctgacttgggtttctgctgtaattgttctcaatggcatctgcaggcagtgatgtcagtcaccagcccagtcttgatgctgagtggggcaagggtggatgcgcttcctgggccgtgcttggacccagactcactgaccacccaaagcccaggtcagcttcctggccatgtgcccctcacagtgactacccagacatttcccactccccactgctagactctatgctattacggccactgctccaactcctggggtctgagctccacttggctcatcttttttcccccatgtccaccacggtttcaaagagagcaaaggagctagaagcaggaagccaggagggcccttccccctggaatccagcctctccctggacctgccctgccaggcctgtggatggcttcaacccaagtcccaggcccaccggccatggggctgggctctcgctcacctctggaagatggaagcaagggacgtctgggtgagcctagcagccacaggccctgagctctgcagcccatgggtccccagtgagcatgagcctggtgctgggcctggcactgggtgaccttccagcctgcgggccttgctgcctggagcacttgccctccggtcttctccaccttctctcacctccctttttccccatttcccccacccttccacacaagggctggagcagaggaccttggagaagccaaagcaaatggagccaaggtcacaggcaggctcttcctgtgtccttccttccccaaggctggccacctttgcagcccggggaagagtagcagctcgtgcagggaatggggatgactttgcaacctgacagcagccacaaaggcagctcattgccgtggtggcagcaagaacaatactggcgctgtagaactaagcagtcatcgccgtgcgctgggggcgcatgcagaggtggacagcttgggagtcagacagatctggtccagggtctagcatcacccctgccgcctgtgtgatcatgggcaaccgccccaccctgcccgggcctgcacctcctcctctgtagatggtgacaatggtagaatggaccaccgggctaaaagctgtaaaagtgcctgtacacaggaatcatcactcagtgaatagctcctgtggctacaacattcagatgccatggctagaggtcaggttctaggatgtgggagctctgtctgcctcagggaggcaagagccaggccccaggaactcaggccttggtcctcagccatcctctctggtcagcgctgtgcatccctctctggcctggggtgagagcctgcaacaaaggtgtctggaagcagcttctggagccaggccaggagagccctggggctagtggctgccactggccatccagccgccctgtccgctgcatcccgggagcccgagagcctggtcctggcctcgtacctgctctcagcaccgcccagccgggcctgcggctgccacagcttctccactaccacggtcgcctccactgcctgcagggccttatcttgccaaaccaaggccaaaaccagttctgagagaccctccaagcccggaaggtatgaagcacctccctccaactgaatccatcagctaagagttgaaagcagcaggttctcagggcaccgctgggtgactttgctgtgatgcctgcccagcccgcccctgcgcccacactcctctccagccacttggcctgggctcatcccacccatcctgcatctcttgccctgcaatccacaggcccaggatggccatggcccctgtgagcccgcaccgggctctctgcaggagctagccaggatgccctggccctgagactggttgaaccaatttttcagtatttttctctctttctcttgttgggtttttatcttctctgttttcatctgttttgctgtgtttcatcttggggttcctctggcccctctactgagaaaccagccccaacaaccagttctcccagagcctcccccgctccagcccaccaacgagaccaccaaccacaccaaggccacagcaagctcacccccgagacgctattccctggtgtctgcttccaactcgggattaattcgaggatctcttagtcctcagttaatgtttcccaactgaatgcgtgcacccttccaaccttgctgtcaaaaccgaatgagaccctggtagagaaatctgcatgagcagggttccgcgcagatgcgttcggtggtggttgcggcccctgcgctgtacgtgcatggtgcatgtcctctccgtgagctggagcctctccagtgacctcactgcccccacctggggccagctctctttggaagggggcagcatcccccaaccctgcccggccctgctccgccccgccctgcctgcgtgtggaatgaaacaggaccacgtcccgtctgtccttgtgggtcctcccgtctccgtcctggtggtctccgtcccggtggtgcatccagccacattggtggaccttccctttgcttgtcccgctgtgtcattggccgcggtgggtcagggccctggatgctgccgcccctcactcacccctccactctgttgcagaaccgcatgcacgaatccctgaagctttttgacagcatctgcaacaacaaatggttcacagacacgtccatcatcctgtttcttaacaagaaggacatatttgaagagaagatcaagaagtccccgctcaccatctgctttcctgaatatacaggtagagacccctccagggacagcaggcccccgagggagcgggccccgttcccaaagcccagtccacccttcctgtgctctgtggatgcccctgactctgccacagagaatccacacaaacggtcccccaccctgcccccagattgtgctctagagaggaggggcagctagccggggcttcctcatcagggaaagccggtagagccctggctctgccacttacgagctgtgtgaccatggcggcctctgggagcctgagctccactgtctgcgcacaggggctctctgtgacgagacgagcaaacgccgagaagatgaggggcggggcacagaggcttggagttaggcagcccaaggtttatgccccagctccgccactcacaagcagctcaggcaggtcatgcagcctctctgaacctcagtctctgggtctgtgagatggggtgatggctgtgattgccctcgcctccctcaccaggtgctatgaagagggaatgagctgatgggcacgcagagcttcgcgtggtgccgcacataggaagcgctccctgcctgtctgctcttgcctttagggttatgcctgtaactcacacggggctgctgcaagactcaaatcacagagctttgcaagcagcagagccctggccccctatatagggtgctggggatgagaggccagccctgccagtgctgtggtgggtttacctgaccatggggtgggcgggcagccaggagggcagcatgaccagggcccctgaggagctgcaggttggcagctctggtcagtgacaccagagcggttacagggccccagcatagctcgggtgcccatcagctcttctgagatggccagaccctgtccagagaagtgagtgggaggagaagtggggcaccctcagcccgacctgccctgaggccttggagggcacagagcaggggcagacagagtcccagtggggcatcccgggggcttggggccaggcaagcagcacagctctcctacctcctgcctccgcccatccccccatatcaggctgagtgcctggcaggccaggacccaggcatgtccagctggagttgagtagggctcagcctccctggaagctcccagccagcttcctctctagccatagttgagggcctgtggatcctgccctagtgacccgggcttgtggcctgtggggcagtggaaacaggtggggtcggtcagttaccaaggccagtgtgggcctggagtggggaaggaggaggggacaagggaggctgagtagtcagctgcagtcctaggacactccccaacctccagcccagattgagcaaagagctgaggtctggcaggccctccaggctttctgcacagcagcccactccagcttagagctgcggctctgaactccagctcccctccctgctgccccctccacagccctgcttgcacctggcatggattcctggaggctgagggccttcagtgcaaagctggggtcctgttcttctgccccttcccaaactagaagcttctctcctagactctcctctccctgagcctacctgagaaccagctcagtgtgttgccccctgaggaaggcagcatgtgagccaggcggttgttaatcccctgtgagtggacagcagaaacaagaagtttataggcttcttctcccatctggcccagcagtggccacaggaggtgatatcaaggcctgctctgtggactcccaaaggaaaaggcccacccacagggtgtgcatcgaccagggctacctgcatgagcccagtgccctcaaacttccttgctcatgacccatgataagatataacatttgccttaggagtccataaatggctgggcatggtggctcacacctgtaatcccagcactttgggaggccgaggagggtgggtcgcctgaggtcaggagttcgagaacagcctggccaacatggcgaaaacccatctctactaaaaatgcaaaaattagtggggcgtggcagcacgcacctataatcccagctacttgagaatcacttgaacctgggagtcggaggttgcggtgagctgagatcacaccactgcactccagcctgggcgacagaacaagactccatctccaaaaaaaaaaacaaacaaaaaagaaaaacaaaaagaggagtccataaatgcatgtataaaaggaaaatggaagtttcacaaaacgtgctccttttaatacaggtgattggccgggcacaatggctcacgcctataatcccagcactttgggaggctgagatgagaggatcacttgagcttaggaattcaggaccagcctggccaacatagtgagatcccatctgtattaaaaataataataataataataataagccaggtgtggtttccagctactcaggaggctgagaagagagtattagtcacttgagcccaggaggtagaggctgcagtgagccctgatcgtaccaccacactccagcttgagcaacagagcaagaccctatctcaaaaaaaaaaaaaaaagataaatacaagtgatatactgggagacctgatattttgtatctttcatgacttttacactggatctgtcccactgactggatccaggaccccctattaactttgctgacccctcaggtcccctccatcaggttttccctgtgcagttgtctctgagaggcccaaggccggatggccacacaggccaggctggggtcgtccatgccaagcagtcccatgggcctctcgcctcaccacaccttgcctgtttgctctgcaggccccagcgccttcacagaagccgtggcttacatccaggcccagtacgagagcaagaacaagtcagcccacaaagagatctacacccacgtcacctgcgccacggacaccaacaacatccagtttgtctttgatgctgtgacggacgtcatcatcgccaaaaacctgcggggctgtggactctactgagcccagccgccctgcccggcacccttgccctgcctggcctgccgccccccctcccctggaaccaggctccaccactctcagaccactctttgcacttgaggaagaagacctcagaggctggcaccaagggagggaggagggagcatcctccacccgcaccccccaacagaacttgtggtaacgcaggggcggggcggggctgctgagtgcatgctgcaaggccaggagactccacgctcacagcctctgtgtcatctctgagtgcttgatcgggaagctggggggacagggcagggcccagatgggcacaccctgcacctgatgactcactggaagcctcggagtgtcctcctgtcatcttgggtggtgcaggggcgcagatggccctgcagcagggtgctggcagggtggggtcataggagccatccttcagctttgcctggggtctctggtggagggcagttccgtcaacaaaagccagggtgggatcaggccaacttggtgtgggttggaggactcaggccttggcgatggcctccgtctccctgctccctcccctgggtctcagcccttccttctctgggtcatcctcccttgcctttgctctcccagagaactcccatccctgactcctccgagttctggaaatgcttcttgagactgatttatggctcagatagatggtggcgtggagcggggggagggagagatgggaggtgcggggaagggaggtggaagctcctgtgtcacctgggctggggcctcccgcccagtcctcgcaggccaaagggtgacccatttcttttttccagtcaccaggagctcggatggtcactctgaggtgtgaatagatatgtttttccttcagtccacactgaattcaactcaaaccagcaaaggcctttgggctggggattctgtggttgcagaggtctagagggggtggacttttgcagccagtgcctccgcctcaccgtcttggtgaagaaatcagcgagtttgttcacagccgttggtgtcttcccagcccctggggacagaggacagcagggggatggagctgacaccctggagtatttggacccaggccagcacaaacacacccccctgtccccaactctaaagggagagtcctaggactccttagaggaggcttcactgcggagatccctgagcagaagggggcggggtagcttctcccggtgacggtgacgcaggtctggctggccttgggcaaccaacacacctctcccactccaagatgcctccaggtggctgaggccaacgcccacacccaggccagtcgtgtgcttgtacagcaggctgtgcctggggacctagatgtgccatgggagggaggagggtacccactgacaggcctctgcctccctcctcaagccctctgttctccctgcccccactctggacactgcttagtccccagccaggcagggcccctgggtttccacttgcagcccccggactgccccagagccgggaagcaccagtgccaacagctctggacttgttggacccacaggcacagagctctgagtggtgcccaggagacccaggaaccttccctagtgccaaatgcctgcagggaccggtgcctggggagcctctggcagccggactgcaggagccaccccatcagcccaagtccacctctgttttgttcacctcggtcatgttttggaccttgcaccaggtgctgggacgtggcagaggacaggccctgggaaccaacagtgtcctaccatggacagccagggccagctaagctaagccatcccgcccaacacagaagacatggcagttatttctcagcagcaccacgctgggtgaggccagttgttccgcttactctgctccgaactgtaaccccaggctcagaagcagccggcaaaagggggatgctggccacgccccacctctaaggccatcaccctggaggtggaagtcactgggctggagggctctccatgtcccccagcagccgccctcagaacacagtggccagagcaccaggctgggtccaggcctccaatccaggccttccctgtccctagaactggggctggaggagtgggtgctcagcccttcctgccctccatccccagcctgcctttctcttcctttggatgctccatcctccttggtttcttgcactgctctcaatcctcccaccctagcctgggggtggtccttggtcctcaggggtatccggggagaaattctctccctgtgcatgacacctgtcatccatgtcgtaaccagcggctccatcttgtggggtggtgactgagggtgacaaatgagatttggctccgtcgtggatgtggatgtgggaggaatgttgcgagtgacacgtgtgggtttctaatccacagtggtcctgcgtgtgccctgaggggccatggtaacctctccgatggctcggatttagcaggccaagcagaaactgatttctacgaagagcgtctttgccaaactcatgaaaattgtgcctgccactttcatgcctatgggccagttttgtgacctgcgccgctgaccatcctaagaaccaggtcttggccttccctctgagcactgatagaggtccccaaggctctctggcctgaggagggtgtggggtctgcccagccccaagcagagagcacagtctgggcccctgaccaacagctttggcattctgggttccatggggaccctagagctcaggcacaagaacaacaccatacctgctgccaggacgcagctgtctcccaggccctccccacagcccagctcccactggcaggaactggacacatccctgccctccatggtctgcactggtcttctctgagtattcttaggagcagaggcagccccaagttccaacttgcaagccctgtaactaagctgtctataaaccccagcagggaaggccaagggatggtctcacccatgcccttccctttggccaacatgagtcctgcagtggggagcttagcccctgctcccacctaacactctacagttagcacccaggggttgattcaggaagttcttcctttttctagcctgcatccttcctggccaccccctttatttctcagtctgacctggtgcactcttggcaagtgagtccattgcagtcccaggtggatatttaatgagcactcggactgtttcctccaagtcagctagtggcctgccctcctccttttcaagaagtctggggcacagagcctcctctggctgcctcttctcttctctgagcctctgggagccttcaggcaaaacctggcagttctcaggaacccagacctgaggctccagctccgcggccaccagagattcagtgtgcagtgccgaaggcagtcacccccaggcagttcctgctgtcaggccgcaagcctagagcgcaggatcccagcagcccagggaacagggccggcgtgtgagctgctgccgtggggtctgtggtagggctccccatctcccacccctcagcaagaagagtcctgacccctgaccccaccctgcccagagaggagctggggcctccagacagaccccactgcagccagatgaaggcccctgtcaaagaaggggcaggctgggggaaaagcagaaagaatggcccccagtccaaactcctggatcccctccatgagagaggggctccccctggaacagaagctctcatccccaggcccagtgcacaagaccaccagcagagacccaccgcccttcctggcagagcaccacttcctggcagtgcagctccgaggcaccactactgtcctccccttccctccccacccctcccctccctttccctcctctcccctcccctccacacctgccctgttactcccacagctctgggcagccaggccctcccctcctgcctcctggtcttctctactccgctggttctgacccatcccctggctctgcccgccgtcccccaccctgcccctgctgagtatcttcttcctccccacgcacccccctcccccatctaggcgaggtgggctcgggcgtcccaggccctccttagaaaagccgtctctctcgagtgcagtggtcccacctcccaaccccatcactgctgcccaccccatattaactgtaattttgtaagaagagtgacttgttggtttaataaatctctagttattgtaataatttattggctgccataatgtatttattagtcgcctaccgttaataaaaagtgcccgctttcctagcgtgagtgtgatgtgttgtcagggcccagggagctcctgccaggtgcacttgcacgatgtgtgtcctcgggccctgccccatcctggtcccaggactgctggcagcctggcagagtgggcacactcctgctggggacagaggatcagggcgactgggcgccctgcccccctgtcaggatcgccatctggtgggaagttgctccgttctgcgccgagccaccttcctgtcctggagagcttggtggccacctggacactgctgtgggtgacgtggcagtggccatggttgcgctggcactgcttcctgctgctcctgggcctccactgcagcctggggcaggtggaggtctagggggttggctgtcagccatctatgatctctgacttctttctcttttctcaaatggtggtatctcttctttgaatgtaccccggcgtctgcttcctctggggagcttgtaaggatgagctgtgctctcagctccttggcaatgggttccaggcagcgtgccgagggagggcagtcaggcctggggggctggcaggggtctcagtgccggcgcctcccctgccctgcaggatctcccctcctcactgccctccccgagtctccaggatcagccgccttttggggctccctccaaggccctctccccataaaaccaggtttggttatgcctgtcctctgctccccaagtcctcccctgcactgccactcctgggaccacagactgtgatcatctttctccagctggactctgagctctcggagagcaggagcctgatgtggtcattcttacatcctcggggcagcccagcagagagccctgcacacagatgccaggcagtactgactggaggagcgagtgtggtgtgagtcgtgctctgtggccctgagatgtaggggctgtggcgggggctcagccttaaccagtggaactgtggagcctaaatgagccggacttgatttctcctccacacctaagctcagtggccaagggggcacagtccccactcccagctcaggtcactctagtggctgctcctggcagtgcctgggaagatgtgcagtggaggagggagcttggctctggctgtgggtttccagctctctgttaggcagctgcaggccaaggtggctctgtggagtggggagcatgttcctgtggaatccttggggtctcagagcctcaccactctggcctcataatgtggctcaatgagcttgagtgtggacagcccgaggccctggacacaggttcactgggcctcccagaagcctccggctgcccttttctgaacagatcccagtgaggtggctcagggcaagcgagacctgctcctccccggagggatcacacagatgacagggaaatgctcctggggaatcagaatgaaatttactgattgaggataggagagtgatgagatcatatgagtttactgaatctgtttagcagaatgaaagggcagtgccgtgtactacagctcctggggggtggggaataacgccatgccagctgtccaggtgcccctgagaggcagctgagaacgctgccctccgccgaccaacttcagctaataggaaccaggggctggggctggccgcctctacaggtcatggtagaatgatgtaggcacgggggagatactgaagggaggactggccgtaagacgcacggagcccgccatgctgctgttagtatcgattcctcgaaagccccacagcctgctgatatggactggagagacccattgcataagttctggatctggcccagctgtgtcaccgcggtgtcccctcaggccagatgaggttaagtgacatgggcagggagagcgctggcacagtgtgggcctcagtgactggtgtggtcacttcatcttcattgccctccttctgctcagaggggggcggtgtggcagtgggaccagcaattcctcagcacccacggtgtgctcacccctgggggaggaggtcatctccccgtagatgcccagtggcatctacaccagctgtcttctttttcttgttacttgtgtcactcttcttatttcagaggtagagtttagcctggttcacctctgggctttagatccagagagctgggtttacagtgagcaagttcccagggctaggacagggttcttggggaaaataagggaaactgtcccttcctcccactccctgtgcagaaatggattcgttcacagagaaagatgccctctgtgctgctgagagacagactctgcccaagtgaatgagctcagcgccccaaagcagagtttttgcccagggcaagaggctgcccccgttcggcatctgtggggcgcccatcacgttcatccatttgctaaacaggctcctgtgtgcagggcagccctccacatctgccttgcttagaacatcatgcagtgtcagatgcagctgagtaggacccagccagaggaggtgtggccagtcccccaggtgctcctggaggtggccctgccaggagcctctcccctgagtggtggcacccaggatgctggcaggacctggcatgccttcccctgagaccataggaagggcccggagtctctcaccactcccagagaacatccccctacccaggatgggcccaggaggagaggtctaggcaggaagggccaaagcccagctctccggctccggtccagactcccccaacgcccacacacacaggcacacacacaggcacgcacacacactcaagcacatggatgcacacaggcatgcacacacaggtgcacacacataggcacacatgcacacgaacacacacaggcacacataacaggtgcatgcacacacacacaggcacatgcacacagccacacacacgtgtgctgggagaccctcacatagctgggaactctgcagtggggagagcccgggtcaccctgtcctcagcctccccagagagccatggctggtgtccagtccagtctctgcctctggccccgacatgacgggttctccggaagcagggaatgagatgtgctgtgaggtgtaactgactcaggttccatctggcagcctctcggaggagctgccgagtagcccagtccctctctgtcaagcctaattctctccttctctttccctgtctctgtgtctccctcccgctgtctgtcctctctcctcccttcctgcggccgcagaaccgcatgcacgagtctctcatgctcttcgactccatctgtaacaacaagttcttcatcgatacctccatcattctcttcctcaacaagaaagatctctttggcgagaagatcaagaagtcacctttgaccatctgctttcctgaatacacaggtgggtgccaggcagtcctgtgcagggggaagcctgcccctgacagggacccatggctcagagaacaggctgctcggccagcactgctggggctagctggcgagcgggacccattgcaggagactggtggggcgcaaaagaaaaacagtgctgtgccaccaggtttgggcttcccaggacacagccctcagcgtggtggaaatggcccctcctaagatatatgtgttaggaccaagtgactcaggagtggtggggagcagggggcaggacaggatcacaggcttcccccttcctcctggtcaccctctagaagaggtctcaggacagcctcctgtaatctcagcagtggcctcccctcacccctgcccagagccccacagcacctttgcatgaaaccgaaaagtggacacgtggcctgtgaacagggcctggactgcctcttggccccacctgctttccctgctccctgctttggtgcccggaacatgcttcatctctgtgcagccgcccagccagaccactccacccatcccacatcgtgcctgccctccctccccaaccccagccccattgcgcctcctctctccccttcttccttcgtccctggtctttgccccaaatccaaccactccagctatctgcaagcctcctgtatcactgcctccctttcttctgccttctctggggctttcttcttgctctcaggggaatgtgtcacagaccttcccccccacccggctcaatgacgctctttccaaatggatggatgagggatggtggcttccgtggaatgggccaactctgggctactgctaatgcctaaaagcagcactgatgggatgccagagcccagccctggtccctctaggggctgggaagcttctaggggtccctggggtaggagttgcctttgcagactacagagtgcacagggccagcaccctgccatggaggaggaggtgtcctgtcatccgccaggtcagggcacaggttggctcggccaggaacccatgttctgacagccctggagtaaggctttgggcatgggctcagtctcagggccacacgggtccccaagctcagccacagggtgcctacatccagcataggtcgatgctggtctccccacccttccccacagctgggagcagtgtgtgaagaagggctgtcagcttgttctgagcacaaaccgtgtcctcactgatggtccgtgctaatgtgaatttgcaaggttcttgcccttcccaaggtgcagagcaggaggtggggccaggaactgtgccctgcactcgaggctctccagcaaagtcccaatagggcagagagcccaggtagcctctggagccagaccacctgcagctcagcaagttgctcagtcatctgtgcctcattctaatctggtcaacacaatgggtaatcatgcccaccccaagggtgactggaaggacagctgcttggtgccaggtctactgaagtgctggctgtggctgccattggtattattcagaggatggaaactaggggagggggaactggccacggagaaggtgccctctgcaggatggagtgagggcaggagggcacaggacaagccctgaaaggccagccccaggtggcccttgggcagagccaggctgtagcccactctggcagccactcctgacctctcccagccacaacgatggagtccagtaggccccctcaggccagggctaccctcagagacaggcccaaccctacggctctttcttgcccagtgtcccactggggcctgacttgggagtggccagtctcactgctgtggagtgcaagcactagatgccccagcgaagggcagttggaacctgagaaacaagttctccagggccttcagaggaatccagtttgaattcaggtatcatggatgacagatggtcaccagtgcagtggccccatggagtgcaaacctgtgagggcacaaaacaagcagcaggggtgggacgggaggtggccggctgtctaagggacgtgtgggccagcatggctgggtggcagcagggctgtgtgaggacgctgggctcggcagacacagcgaaggcacgaggcgctcctcccacctggacggcttcctgtggccaccttccaccctgggctgtgcccagttcggctctctccagacaggaagctcctgggcagggtccacacgggctgctttgtccaatccttaacagctgtgctgtgggcttggcatctctgcaccagtggatcaaggatgaggctttgcactgtgggtccaggcactcctgctgggctgcccagagctggtctcagccatgacaacccacccaaggctgtcccaaccccctgccccttgccccttgtacacccaaggaattggtggggacagagggcccccagttggcatcatacatgctgatgtccccttaaacttcccaccttggggacatcaatgccccaatgtcctggccactcgcttaagaaccacgcctactaatgatatgctgccagccctgccaagtggcctcttcttaaaggaaaccaatgaggaaggagtgcaggtccctctgagtgcccaccaccctcttgggcaggcccctctccagactttgttttcatggtttactggaatcagcaggattggtttagaccatggggcggtgcctcaatttgctcatctaggaagcaaaagcgttcatctgtggccactgctgtcccaggcggggcttccgggtggatctggtgtgaaaacagtaagagatcttgcaaagtccaaagccaggcaaatgctcagcctgtgtatggttggtgcaaaagtaattgcagtaattgcagttttgctatcaaaagtaatggcaaggccaggcgtggtggctcacgtctgtaatcccagcactttgggaggccgaggcaggtggatcacctgaggtcaggagttcgagaccaacctggccaacatggtgaaaccccgtctctactaaaaatacaaaaattagctgggcgtggtggcacgcgcctgtattaccagctactcaggaggctgaggcaggagaatcgcttgaacctgggaggcagaggttgcagtgagctgagatcgtgccattgcactccagcctgggcaataagagcaaaactctgtctcaaaaaaatagttctttaatttaaaatgcaactatggcttggaactgcccagcagttcctactgctcccttcctgtctcatcccacttcctgggacacgccacaacccacttcttgtcttcatgtccccagccctgtccacccacagcgctcatcagggcctctccccgttcttctgtgtcttgttacaggccccaatacctatgaagacgcagccgcctacatccaagcacaatttgaaagcaaaaaccgctcacccaacaaagaaatatattgtcacatgacttgtgccacagacacgaataacatccaggtggtgttcgacgccgtcaccgacatcatcattgccaacaacctccggggctgcggcttgtactgacctcttgtcctgtatagcaacctatttggtaatgattccagcacccacagaacagcttgcgtgcgcgcgcatacacacacacacacacacacacacacacaccactaacaaatgcaagttggtaaataaactttaaagaggcataacaaaaccttatatatatatatatatatacaaatatatatttaaaaaatctttttagtttgtactagaaagagctgcggacagaactgaccaccatcccatagctcatggaggttttcctgggacggcacgtgagcatgcacgtgtgtgtgtgtacacacactcacacatgtccagatgggagcttggtttgggagtccctccttttgaggatagccccggggtgttcctctcagccccatttctgagaacaggtgaatggcagaacagccctggccttggcccagccagctctctgtgttgcgcccttagagcctctgcgccctcagttccgtcctgctcttggcaaattccagaccctttcagaaatggccgaagccctaagcctctcctcactctgcactcccaaaaacagaacaatttaaggatgcttctctttcgggtggtggtggttgttaatttcaggaatttagaagaatcattgctccgaccaatccactgtctcctgagttttctttattcatgttaagatggcaagaatcagagaacagggagacttggtctgctttctaaaagcagctgacaggaggggactcaagttcacctgcagagttgaaaccagccccgctccaagagggcatgtgggaaggtggggagcgaggggaacaggcgtggcggggagggccggacttgtgggcctgacccgagtcagggtctcaggggggggccaggcttccccaggtgcccgggatgggcttcaatggggttcctgacccctcgtgctgctgccccatctcgcccaaccccagcagtagtcaaaatgttctagggttttttggttggttggttggtttttaaaatcaaagaaaatggtcagactggaccccttatctctctctctacagactgcttcacggactctttgctgttgacgttgatctcctggtagcatgaccttttggcctttgtaagacacacagcctttctgtatcaagcccctgtctaacctacgaccccagagtgactgacggctgtgtatttctgtagaatgctgtagaatccggttttagttgagtcttcacatttagaatttgaaaggaaaaacagaacatttctcatgtgctttgtagcttaaaaaaaggaaaactcaccatttcatccatatttctttttcttgcaaaacaaacatacccatctgcaccgacgcctgcccccgtcccacctcgcggcgcagcccctggagctcctgctggggggcagggcccatctgccgcctggggctccggtgcggtgcactggtccgaggagtgtgctcaggccgggctttccagaaggccacaggccactgcaaaccctgctgcctgccggccgcccagacaccacagacgccacctggcggccctaagccactcccgccacacgctcactccaggttcgtatagaaaaagcacagctctcactggccagtagctgccaaaaagaacacccatcgtataaggaaatccagccccatagaaaacaatctgcccaccgaccccctttctaaggatagcctttgtaggggttttttggttccttttttttttttttcagtttttgtttttacttttgtcccgccgagtactatgtattaccagccccccaccccacagatcagttttcctagtctttgggaaacgggttgtgttttttttcctttgccgtgttggatttccggtcccggctgacacctcccttcgtgtgtgcgcccctccccacccctgcctttgtttcggtgccctgtgtccgctctctcatgtggggatgtttgtgctgcagacaaaaagaacaaaaaaaaatttttaaataccacaagatggaaaaaaaaaacaaaaaaatttaaaaagatggaatgtagtgtttacattaaagccgccgttttcatgaccaatcctatgtcatttctactttgactaatacccaaaccctaaacctcttcacggtttcacttttaagacttaatctttgctgaagaagaccagtcacagccatttcaaataaagaggaggcaaaaagacaaaacacacaaaaaattaaaaaaaaaaacttaaaaaaaaaaggaaaaaagaaaaaaaagcccacgggtctttgtaagcctttctattcccaatcggtgaggtttctgtgatatcttacacactgccagtctacttctctgactaatggaaaattcctgtgtagctcaataaaagagaatgtttgtctgtactcctgagtctcaccctgtgccttccaacgatggttatttggggtgggcttcattctggcaggagagggaaggagggactcggccacacacgctggtaggccggtggttaggagtcccccacaggaccttcccatcccctcagtgccgtcactggagccccagctcagagcacagttgacgcgaccactgcccagtgctgcctgggaatgagggcaggggagccgccactttctcctgcgatgccctctcctcccggctcccggtgcctcctcaccctcagtaggttttgtttgcttttgagaaatgaggtggaagtggggattaggaaggaagaaatgcaagaagggcaggcaagccccctctcctatcatgcaggatcctctttcttctgtagccggcggttcccccacagtgggaggatgggtggtcccaagaatgaggccaattgcctgagcccatctgcacccaagagttcccagccactcacatgcccaggacgagcttgggcccagcctgaccaggaaggctgccttcgatttgctccctgactgcacctggatgccaggaagccccctgcaggccgaacacgcaggaggtaacccagcagtgcagtggggcacacggagtctgatccctgttcctcccctagactgtaggtctcacccgtcccctacattggcccgcttttgctgtaataattagcaaatgggttgcaacggggacctggaggcaacggcagcccactgaacttgcatcatgtccacacgccacttcctgtacaagcggccaagagcatcatgtatcatgctgtcttcagtgagatgggggagctgccaagaggtcagttacctggaatcctctccacatctcaacaaatgggaattagaggctcagaagggcctctctcgggcaagttccagcagtcttttgaatcaagggggtggaggcaggggatattgtttcagagactatggaagaacaagaggcactgtgataaatacccaaccaatacaggcaccccttaaacctcttctgctttccccctggttccccaaaccccaacttatctgcagagaggggcacatgacctaccctctccattgaggggaaggtttgcaatccaggccacagtttgactttgtaacaaaccaagatccacatggaaggctgaaggaaaccatgacattttctatatatggcacatttgaatttttctgaaaaccaagccatattctaatagggttcttcccaactttcaaatgagttttgcaataaaaccaacagaagtttatttgcctcatttttcttagaagggaggtcatagcattttttggaaaggatgcagcaaaaaggccaattaaatcggaacaaggagagtgggggcagaacctatctgatatatatatttttaaagatcctttttcccccctagtttatctgtgcacacaattgtaaaaagctagttctaattagaaccaaatcaaataggagatttactt

SEQ ID NO: 232 - DNA, 74455 bp, Homo sapiens
  source 1..74455: mol_type = genomic DNA
agcagccaggttagctcccactgtagggatctcctcctgtaggccatcatttgattttctagggccaagaaagagcggcactatttactccaaatcttcagccttgcagagtacaacaacacgatctagtggtgtctgaccgccccctagccctgatccaatcattttctcatgtggaattcaagctagattaaacaatgttggtgggtacagagggattctgactgattcaatctcctgattcacagcaaattaatccaaaatatcctttccttaatacaatacttttgttgttgttgttcactactctaccttcagcacctaaaacacagcttggcacatgcaaggcacccaatgagtattgctgagttacctttgttaaaaacctatctaggagccgggcgcggtggctcacgcctgtaatcccagcactttgggaggccgaggcgggcggatcacttgaggtcaggagtttgaaaccagcctggccaatatggcgaaacccctctctactaaaactacaaaaattagccgagcgtagtggtgcacgcctgtaatcccagctactcaggaggcttaggtaggagaatctcttgaagccaggaggcagaggttgcagtgacccaagatcacatcagtgcactccagcttgggtgacagagcaagattctgtctcaaaaaaaaaaaaaaaaaaaaaaaaacctacctaggaaatggctgtaaggggcctccagtgaggattccgtgtcaccctgaactgccccgcaggagagaagtggttgtgtgaactgagagcgcaggaaagacttccctttacccatgctctcagctccagtccacttccagcaccaccttctcagctcaatcgagctcagggcagtcctcagatgggcttgcagacttgcaaactactacctcaaccgtgggggcccttgttgaagaagatgaggtaattagccaattcagactgtttgagcacgtattgtttggaaacttttctaattacagtcactataacagatctgctaaaggtagtttcatgattaatggctgcccgaagttaccatcctcaaactattaagccattggaaaatgctagaggcttaatactcgtgtatagacagaccctcattcccctgaatatttgctatttggggttctgggtttttagctgctcccaggctgtgtttatttccccaataactggggaaactggggaggggcacgaccccacgggagcctgcgcccacctgcccaagtactggacctggggctagcttgccgcttgctccttgccacccgccaggccccccgcccatcgcttcgcccaaatcctttcaaacaaggttccctcctgccacctgccggcccactagggtctgcgccacaggctcggcgccaccacgcagctcgcggggaggtggcccccacctccttactgcacatgcccggcagaagtccgggcgcgcaacttcgcagaacctcactgcccgtccctcctcgcctcagtctcctctgtcctctcccaggcaagaggaccggcggaggcacctctctcgagtcttaggctgcggaatctaagactcagcgagaggagcccgggaggagacagaactttccccttttttcccatcccttcttcttgctcagagaggcaagcaaggcgcggagctttagaaagttcttaagtggtcaggaaggtaggtgcttccctttttctcctcacaaggaggtgaggctgggacctccgggccagcttctcacctcatagggtgtacctttcccggctccagcagccaatgtgcttcggagccactctctgcagagccagagggcaggccggcttctcggtgtgtgcctaagaggatggatcggaggtcccgggctcagcagtggcgccgagctcgccataattacaacgacctgtgcccgcccataggccgccgggcagccaccgcgctcctctggctctcctgctccatcgcgctcctccgcgcccttgccacctccaacgcccgtgcccagcagcgcgcggctgcccaacagcgccggagcttccttaacgcccaccaccgctccggcgcccaggtattccctgagtcccccgaatcggaatctgaccacgagcacgaggaggcagaccttgagctgtccctccccgagtgcctagagtacgaggaagagttcgactacgagaccgagagcgagaccgagtccgaaatcgagtccgagaccgacttcgagaccgagcctgagaccgcccccaccactgagcccgagaccgagcctgaagacgatcgcggcccggtggtgcccaagcactccaccttcggccagtccctcacccagcgtctgcacgctctcaagttgcgaagccccgacgcctccccaagtcgcgcgccgcccagcactcaggagccccagagccccagggaaggggaggagctcaagcccgaggacaaagatccaagggaccccgaagagtcgaaggagcccaaggaggagaagcagcggcgtcgctgcaagccaaagaagcccacccgccgtgacgcgtccccggagtccccttccaaaaagggacccatccccatccggcgtcactaatggaggacgccgtccagattctccttgttttcatggattcaggttagttgcccaccgctaaactggggagcctgagggcggtgtgggagcagcgcaggtggaaaggaggtgagaaggaaaggcaggtcaggggcgagtgggaagagaggaggctcagctggtcagcctgggatcgggggtcagggtgaggcggcgagggctcccccaaacttcccaggatgccaggggcgccctggtggccaaaggcttgttggacggcggggcgcacgccgtgcgtcccgctggagacaacctgaggtctccgagctggtgccccggctacgcgactgaatcccgaacgcaccccagatttggagctgcacacccaaacggcattggtaagtcacttgttttgcgcgcttttcttcctcctagaaagactagtctcaaataagttggccttctcaggtgtccaaaatgtggttcggaggtgcgcgcgccaactttcacgatgtgagagcagccgcgctgtagagacaccgttgaaatgtgcggaaagtaatctgaatgggaatgggcgagaactctagagactgaccacccgggagggaagtcacgcgcgcgcggcgcctaagcagctcagagccggagcccaggtcccagagctgacaattaagccgcgggacctccgcgccagtgcctccagctgccgtgcgccagccttggccgccacagcccgcctcccgtcgctcgcgggacagagaccgcctcaaagagcgtgcgcacctgcccgcgcgcgccggagctgacctctcccggcggcgggcggttaggggaaagtacctgggggaaaggtagaggaggtaaggggacccttggggatgcccctacgggctaccagggttgaacgcacaggcatggtcacgtcggggtattgccaagcttttggcgcagctggtcgggtggccaggctgcatgcggcttagcaggagacgtcctgggctgtttgcgcaggacctctggaggccctcgagatcgtcgcaagtggaaaggtaaagcggaacaagggacaggctggagacgggggtcgcgtctaacatcaggataacttacaattcgtttccaaagagcgcggtacgcgcagagctggggaaaggtgttggatccggcgccagtccttggacgatcagtcgtcgaaaaggaggcaggggccggcggctccggcagccttggggaggggaggcgaggcggcgtgctccggccattttcagcacgggtagagttaagtttaatctgtaacctggaggggaatctgctctgatgacccagcacaaaaacggcagcaatctggtaacgcaccttcggaagggaaggcgtgctctcctcgccagtcctggggggaaagactgataagtgaaatgtctttaaaaaatctcatccgacttggaaattgattttttttttcctggtgtgcgtgtctcattttgcgccggcttaattatacggatgacaacgatttggaggaatagtaaagcgttttgagggcttgagatgaatgacggtcaggttcttaactcctaagaaaaggatgatgatagaaggaaaataccttaaatggtcttccttccaggacctattccgtaggaaaggcgtcgcggcgcccaagacttagttctgccgggctgcagcgcagactgtggttggatgcttttgtggtcttccctagtaaatacggagaaactagtttatttgcaagtggttttctgcgacagcaatgttagtctcagaagtttggaggctgcggaagggctaggcgtgccccgcttttggcttgcccctaagtcgaaattcctgcttaatgtaaacaatgatggtgtgttggctttctgtgacattaagtgttcagtttttcctctggtaatgtctcagcctgagttcaccaagcaaaatgtctctagggacaagcaagaaaaactagggattgtgttgaatttctttggtgtgcctttcaagtgtgggagctatcttcagactgggtattccgggagacccgttttcccacagagaattattcattagagaaatgagcatgttgccttgttgcaggatgaataaacaagttttttaaaagccctccgtgtcgagcccacacctcacacccatcttgctgttttttaaacagaagcccaacatagggatgtttcctgaactgtaagcaatgtaccatgttcacatgtagcgaggaggggcaatctaggaacacacactgtctttcagacagtcttccacaaactgcctcgccatctgcattacagcccaattgtaaaaacctgttacctaccggcacacactctcccccgctcaattcccctcccccgctcaattctcctcccccgctcaattcccctcccccagcttccctctttacaccctgattcaagggtggaaaagccagtgcagaccatatgaagcaactgagagctataccaacccccgaggaaagcacctatggccctccctgagaagacaggattttgctatatagacttcgcaaaccttctctctgcctgagagactggtactcagctccttccttttccagagccatttttagcaacttccccaagcattcccaactcactagtctcccagctggccctttgccccaccctgctcaactggggttagcatctgaataggcccacttgccccttttacataggtgaggtctgcggggtgaggataggctcccaagaaaaagcagatcttatggtgaaccacataggtgaattaccagccacttttaatatttcaaatggagggtgagggaggaggaggagcaggagaataaagctagctaaacatgatgatatgcccccaatattgaagttgtttcctttagtacattaatcatttgcttaatggaaatttgcttttgtgggggaggggagggcgacccaaaggtgctcttgtaactgaacttatctgagctgggaatttatgttgcaatgttccaatattgtgtggggtcaacctgatgtaggtttaaagttttgcaaacaaaactcttttatgttcatcagaattcaagaattagaaatgttacagtttgggattgttttgagatgtttctttaatgcactgcaagcctttctcaccctggagttgcttacagcctttaactcttcagccttcattttctgcagctgtgtggaaggttaaggaggaagaaagctgaaacttcagtgttggtaagaatgaggttttttggttttttaataatctacatggatttacctcaattatcagttattattatactgctcttcaagaagagggaagcttttgagaggaaactgagcagaaaccatggtgtgagtaaagcatgtctcctaactgcttacctggaaggtgacctatcacaaaaaccaaatcactaaaataaaattaagcttccaggccagtgatgtcatgtgctggctcaactgctgctcttctctaaaaaatcacccagcagagggatgagatgctcaaatgacatctttaatccccatgttcaagaatgagagatggaatttcttgttctgttgtggggttttgacactaatgactctatttcctataacttgatgtcccaaactggagcagtgggatctaagacgaaaggcccagggctagcagcccaggttgcttctagccatggtcaagtggccttaggtcagacccaacacccctctgcctcagtttcttctaaaatgagatcgctgaatgagatgatcctatttatccctttcagctccaaatgtctagattgattagcttaagaagcctggggttgtccaatttgactctacactagtgatttaaccctaatggaactcccaaaaaacatcgaaagttgctcaaataaaaagcaccagctaggtatcgcgccattgcactccagcccggcctacagtgtgagactccatctcaaaaaaaaaacaaaacaaaacaacaacaacaacaaaaaaccccgaaaaacaaaaaaagcaccagctaggaagaaatctgttttgtgttggcttcatgtaaattttgtcaaatctgctttacagttggttgcaaaatggtctcaaaaggcagtttagagaatgcagaattccactgtgtcctttccctaaactggaaacacttagccatcctgagagtcgtatttagtgtgtgttttacgtgtgtgtgtgtgttccccaccttctgtccctgaccttggtgtctaagaacaagcttttcagagcaggagcaggcagcaaggttgcaagtactgacctagtactgcagcttggagaggctaaccactgtgggggacggcagactgatgggaacattggttgagtgaccacaagtgctgttgaaagttttttggtaacagttttaagtgttttggttaagctagacctgaaaaaaatggtatagaagctacagctatttgagataaaccagttttctcaacctttgtttttttcatgatcactcccctcttcgcttcttcagacatatgcttcttacttgcccctccccatgacattttaataccatggacatacagctagaccccactgtctgtttatgcactgcaggaccttgtcacagctaagacttgtttgcgcaccgcatcccccaaaaccagttttgcctccatcatacatgcatgggataaacaaagcaagcatttcaaaaacaaaaaaatctggttctgtcaaattaagtgatgtagcacccatttttgttttataatttctttcttacatatcaaaaggccatatgtggggggtggggggcataaattttttactggtatttgttttctttcccttgtttaaaaatctcatgagttttttcaaacgcctccaatagctatgctggtccaagcactagtggccattaattcacagggcagagaagccagaataaacagcctagtgacttagttctcccaaggccaagagcctgcaatgcggggccaccattacctgttgacagtgctcagccagcagaggcaggactctgcctgcaactattcccgggtagaaatggggaggctgccttcccagctcccactgggcatagcctgtgtgtttattttttgtgtttattttagggtaagtatgttacaaattagcagggcacatggctatgagaaaggccaacataaacccaggcagcagggacagagggtaagtggtgacagtaaagtggggagagatttaaggaagacaaaaggaaaagaagaatttgagggatcacagaaaaaaaggaagatgtgggtagataagagaacccctgggaaggagcagaaaagaagatttagaaatggggaagggggtcacaaagccaggaaatttggcggttataaagaaagtcgtttgaaggaataaagagagtcttgaagagagaaaggttgagggcagcttcaagtatctggtggctaagggggttagaaccaggtgcatcaagggacagacttcagctcaacattaggaagggcatttttaaaagccaaatatggcattggagggctaccaatgaggctcacagattcgacaccattaacatcactgtccccctgagagtttcgtacagacctggtccaaaaattccaatttcataggtgtggagttttcatacaagtacttcaattgctacactcaaagagaaagatttaacacctagaaatctagctgtctagctccaaggctaaagctttgggttttggttcacagcaaggttggtcttcaaggtccccactctcaaacttgaggggtccaaggggcacaggccaaagaccggcagccagcagaagaccacgtttcttctcccctcaaccccatgtgagagctggtttctgagtgtcctggcttatgtcgctgtcttaattagatttcattaggaaaatttgccctgggtaattgaggttgttctagaaggtgaaatataccattccccttaaacaatgatgcccagaagcccccagggtggctggaattcccactatgaattgcagaaattttaagcagagcttccactaaagccaaatttaccttccgagattccctctttcccctccaacccccacttttgcctctctcttagttgctttcccatggtgctgttcatcttttctggaatggcctctcctcccctgaaattctttgctgcatcatcagctagtctggagaaggaatccacaaatgtctggacccactgttcaagcacaggtggtcagaggacagtggcatgccttggctgaaacagaatttggggcaccttttgagaaggttgctgagctacagctaattagctgagtgaaggggtctgaactcacgatgggggctttttaatctgagcatatcaagtattttcataaagactttttccactacctctaatatcagccttgcatctgcctctaacctggtatcttgcctcatccatttgaggcttttttcctttagctggcatttgcttcaaacagcctggccacgcagacccctctgcagatagcagtatgctgctgcctccaccggccaaggcgggcagaggagagtctgaagggaaaaggatggcagcagcaagtcttgattgaaaagtaattaattgtacagcttcaaagtctattactactcactcagcactcagaaaacatttgtcactgggaggctgagaagcttcatagttgcctaaattcttttctaccttctctttctgcttttactttttcctcaattgaaagaaacccactgacaaccaatgacatgaatgggctgcagagaaggcacttctgcaaacttcaccacccacctcctccctgcaaagccgcagaccaaaaggaaaatgactaccaaaaaaatactgtttttcgtggtttctgttcccttccctttcacccacctcccttccctctctctactttgccttctctttgttggctacagggataaacccagaaagctgacaggtagctacctaaacttgagatatgccttatgcttttggtaatgagtaagaatcccagaatgtaagtagaaacacaattactcgttgaatacatatgccatgaaagcatcaatagagaggtgagactgtttgggaggcccagggcatcacgtgcggcttccaaggaacggggctgtaatggtgctgttcagagagtcaatggtaaagaaatacacacattctttctattgggggttccatattttcaaaacgccactgtttgccacctgtggcacctgggccatttggctttcctcagacatgcagagtttaatggaagcatgagaaattcttcccatgcctttcttagtacatcaagtgcagacgctattatttttaagtagccaagtatacacaattttcaagtaaaccatccctgggtttcgacagccaatcctgtcctcccctacttgacacatcatctcactgcagccctacactccagcacacagcccctcatgacaggggtcaagaccctggcacacagcgtctatccatcccaactcggccttttttttcaggcaccagcctctcctgacttcctcttccttagctgcataaacacattaatagactttccttcctcagtcctatcacatatttatcttttcccatgatggcaatccatccagcactggaaagctatgtttaaggtactttgctattatacaattataatggcagatcctaaaaaagccccggcaaggttaggccccagacgatgctgcccactaacatccagcactggccatctccctccagatcaaggccatgtttctgtcttgagctagcaaaattatcagccttcaggaggatcaccagacaagccaaccaatcaggccaatcaaggtggaccccagtaaacccactagccgatcacccccagctcttactataccggattcctcaggtccctgtggccttgcaggtgccacaggtgggtcaactcctcgaacatttggccacacttctggggtccctgaccccattactgatgtttcagctcttagctccactcacctaaaggacttaggtttttcagagtctggtagccagtcactacagagaaataacaggagtggaaaaaagggggaatatcagggttaaatactgggatttattcttcctagtcttaatttatctttaaattaaggcaattcctatttaaatctaagggtcctttctcagcttatagtggtgattttcaactgggggagattttgccccccagaggacatttagcaaagtctggagacatttttggttgttaaaactaaggggatgctactggcatctagtgggtagaggctagggatgctgctcaacatcctacaatgcacagggcagtcaccacaacaaagaattgcctggccccaaataccaccagtgcagaggctaaaacaccaagtctagatgagatgtgctgagtggttctgaaaccccttcctctggtgtgctcccatctctcccttctgagtcctccctactcactcctggactgtctccctttttcctgtccagtgcgccaattgttcaagattctattaccaaatgtatttctcccctaaagagttttctctgactccataaattcatctttgtaagtacgattgccaatttgaatgtgtgatctttatctttttctgaacttcagacctttcctcccagaaaatgggctgcaaaaatctccatcccaactgcccaaagttccttaatctgccatgtctaaaaccaaatcagcactgccaccttgccagcccctcccactgacttccctgtcccactcccagtgttccatccatctgggtgccacactttggctcctccatcttttgtgtctttctagcataagagctgctccaggaggatcctttgggacccctcttgagtgccgtccttcagccttcctgcttccttcaccgtgctaggtctctcctttaaacatctcctttgtgcataacccctttcctttgttctcgatcaggatcatcctccatgctgcttctgcttttcctaaaagtaggctcaaatcctcacttgcagaacaaaaaactttcaacatcctttccgtttcctgccaaaatagcctcaaaagtgcttgccctcatactccatggcatcctcagagagattctatctaatttctcctaacttttctccccctgctccccaagagccagccaaggtggccagttgtgtttacccagccacgccccatgtttcctaccattaaatcctttgttcgtggtgggcaaaccgtctcccatcccccactaccaccttctattcatagccaaggcgtctatccttccttggaggcccatataaaaagtcattttctccagcaagactttcaaggtccccccaggtggagttcttttcttccatttgtatgctgctctactctccaggatgaggaactggtatttgtctaacttgttaaatttgttttagtcacctccatgcatgtgctcccctggcaaagctcatgatatcagaaagaatgaacaaaggggtcccacagacccatgagggtgtcgaacagagaccctgaacccgttcctcgacaaatggtactttgggggtgagcgcgaggcctgacgaaagcaaacaacccctttggagcacccatggcagcctccctggggctccaaccccaatgtctactgaccttccacttgtgcaggctcagcatccctggggcctcaactccttatccatcctgggctgctcctcgcagtaagccctctccttggggtcctggccctctacctcccagccctggaaatcttcttgctcctcaccttgcccggcagtggcaccccgttggctgggttagcctgccgccatcaacacacccaagggttggcccctgggaccccacctctcccccgaggctcggcaacctgtggcatgaggaagagtgaccccacggcgctagcggtcctcgtggtcttccaggcctagccgccatacacccgccccccaccggcttccaaccaccccagcagcacctcttcgggcgttccaacgcggcgccccctattggacctcccacccatatccggtttccggtctgacgccccctgctcattcgccaggcagccttgattggcatgacccctgcccaatggctgacccggcgctggggtcggaggggagtgagttggtgttgggacccagttgggccattcagtggatgctcaagtggttaagccgtcttgcgtgggtgtagttggccaaagtttgaatcaaagttcagtgttgacatctggaagtgtgtagacccatagagctaaagcgatatatctttgggggatcccaaacgtttcccagggtccaactgtgttcgcctccttccgtgctgcgtggccacatggatggtggatgcaggggtgcaaggatgcacggtgcctgtggtaccctggctctaagagggatgcattagactaaacgggatcgcaacttgcggtggttcgcccgcctgcagctcttatacagcagcccgtgccgtgcgccctgcttgctgcagcccgccctgtgtaactcatccagcctcccctcccccagggttctgcaggtcagatgaccccctgcctcctgcccagttgctctgtgcctagacgtggctcgccaatctgtctcactggtgagaccgacctgatgcgcacctgccgagttttatgtgacccccttacagcagcttttctcccgggttccaatccctctgcagaccccagaccagagcatagcatgtgcacacatcaaggccaccaggtggtgtgggcatttacctttggctagctctgagctcaccgcagcatggtagcgggagcgcagctgcgcgggcaaccgccgggtttgtggccggttggcgggctcagtgccgcctcagtgggctctagcagtagaaaagtaaagcgactaccctaagatacccagagcgagaggagaggggctagaagggtgctggaggcaggctgtagtggggctaaaggagctgactgaccagcgctgcggccggtgcccgaagcagcgagcagcgcacctcagctccggttgccgcgcggcatggtatttatctgtgggttcagtgcgcacagcgttgtccagtctcgaaaccaccctaaaccggcattaaaccccaaccaaaatcccctttaacccttccctagaacagcaggacctgcgaaactctgaggccgctttgtgaggtcctcctctgcgcagcacgccccccacccctctcttggtgccgccgcagctactccctagggggctttgctcttggtggtacgcacccgagaccttcttattcccctgcgtcaccatccacataaacaagagagcaccctgcttgcgccgctgtgggccactgcggagacccctagagtgtgatgggggtgggggctgttaaagtgctttaccggagccaacctcagcaagtgacaaacaaaagcagcaaaaagtacacccaaggcatttaaaaaacaaattgcgtgcttgcatactcggcatcccctctccctcgcctctctctgcttctttggtgggctcacgaccacctgtcgcatccctacgcgtgcctgcgccccttcccaggcaccaaaagccttgcgctccggactaggggcttgagatccggggctgcctggaggctgggggctatgactcagagtttcaggggtatcctggggtgatgaaatccttcttcagtcccccctcccccgaggagtcggttgggttggggagggagggtttcagctcctgtactccagcgttccgaggcccacgtcttgcgtcacgtgtcccgcaacgcaggagcgctttctctggccagcggagaagcgaggagaaagactccaaatcagtcagggagaggagtggaaggagccaaaacgtccctgcgaggcctgcgctcaccagcccccttacccaaagtcccgggcccctggcgccaggagcaggctcctggagccggagccagctcggcactggaaccggcgtcctctggtggcagagagagagcgctactggcgattttcggaccgaatcggcacgctcgtcagatccaagcaggcgggactggcctggagcaaaaagaaagagagaggagggcgtaaggatagaccaaggaagaggggctggggggcagcctgggggcatgaaaagtggccaggaaggagccaagactccaccagcaacaattgagttgcttcagcctcagtctagggttccttccaggccttgaaccccccaacctcacaagggttggaaagtgaggccggtgaactttccagctggtactttgattttaaaataataataataattttttcaccctagttcggttgggtgctccatcttacggagccccaaacttattttgagaggccgccaccgtgttatgggcgtgcgcaactgcctctacggcaataatatgtcaggacaacgcgatatcccccctgaaatcggggaacagcccgagcaaccacctttggaggccccaggggcagctgcccccggtgctgggcctagcccagccgaagagatggagaccgaaccgcctcacaacgagcccatccccgtcgagaatgatggcgaggcctgtggacccccagaggtctccagacccaactttcaggtcctcaacccggcattcagggaagctggagcccatggaagctacagcccacctcctgaggaagcaatgcccttcgaggctgaacagcccagcttgggaggcttctggcctacactggagcagcctggattccccagtggggtccatgcaggccttgaggccttcggcccagcactcatggagcccggagccttcagtggtgccagaccaggcctgggaggatacagccctccaccagaagaagctatgccctttgagtttgaccagcctgcccagagaggctgcagtcaacttctcttacaggtcccagaccttgctccaggaggcccaggtgctgcaggggtccccggagctcctcccgaggagccccaagccctcaggcctgcaaaggctggctccagaggaggctacagccctccccctgaggagactatgccatttgagcttgatggagaaggatttggggacgacagcccacccccggggctttcccgagttatcgcacaagtcgacggcagcagccagttcgcggcagtcgcggcctcgagtgcggtccgcctcactcccgccgcgaacgcgcctcccctctgggtcccaggcgccatcggcagcccatcccaagaggctgtcagacctccttctaacttcacgggcagcagcccctggatggagatctccggacccccgttcgagattggcagcgcccccgctggggtcgacgacactcccgtcaacatggacagccccccaatcgcgcttgacggcccgcccatcaaggtctccggagccccagataagagagagcgagcagagagacccccagttgaggaggaagcagcagagatggaaggagccgctgatgccgcggagggaggaaaagtaccctctccggggtacggatcccctgccgccggggcagcctcagcggataccgctgccagggcagcccctgcagccccagccgatcctgactccggggcaaccccagaagatcccgactccgggacagcaccagccgatcctgactccggggcattcgcagccgatcccgactccggggcagcccctgccgccccagccgatcccgactccggggcggcccctgacgccccagccgatcccgactccggggcggcccctgacgccccagccgatccagatgccggggcggcccctgaggctcccgccgcccctgcggctgctgagacccgggcagcccatgtcgccccagctgcgccagacgcaggggctcccactgccccagccgcttctgccacccgggcagcccaagtccgccgggcggcctctgcagcccctgcctccggggccagacgcaagatccatctcagaccccccagccccgagatccaggctgccgatccgcctactccgcggcctactcgcgcgtctgcctggcggggcaagtccgagagcagccgcggccgccgcgtgtactacgatgaaggggtggccagcagcgacgatgactccagcggagacgagtccgacgatgggacctccggatgcctccgctggtttcagcatcggcgaaatcgccgccgccgaaagccccagcgcaacttactccgcaactttctcgtgcaagccttcgggggctgcttcggtcgatctgagagtccccagcccaaagcctcgcgctctctcaaggtcaagaaggtacccctggcggagaagcgcagacagatgcgcaaagaagccctggagaagcgggcccagaagcgcgcagagaagaaacgcagtaagctcatcgacaaacaactccaggacgaaaagatgggctacatgtgtacgcaccgcctgctgcttctaggtaatgcggcggactctgcctgcgggcagcagggccgccggggaaccggggagggggtggcagggctgcctggtggggctaggggctccgcagtgggaggagggggtccagccaaaggcgggaagaacttgctagaaagttccagggagggaccctaactgccctgggagcgggaggggatctttggtggattcgggtggccgaagtatatgccctccagggagaaaagtggtgccgagcgacactgagggtcgtttccggctggacaggccagcgccagcaaccgtaagctggacaggcaggggcttcaggtgagccaggaactgccggggaggggccccggggccccgggactcccctggctaggctggtggggtccacggtgggctggggtcattggggaaggcgcgccccgcctcgcctggcacggctgcttggactcagacagcttgtcgttggtgtgtgttggtgtccatattctgtgttcgcctgtgcatgatacgctgaagtgtcccctgttcctatcccggcacccccaaattacccgccgactgtgtacttgtacttgggaacgggctgtgttgtggtttgcgccatggcccgggcaaaaaactttcgctgttcgcacactctggtggtacctgcgcccgggcgctctgcggcaagcggtgcggaggacacgcggggaaggtggcggggcctcccgggaaataagcggggcccttggcctgggggagcggggaatcgcttttcgccggcctccgcgtaaccttgtttctgtatgtctttctctctttttccttttgcgctaagcgtttcctcacttctcattcgttcgccaaaccctcccgcctttacagttgaaaaaccagacacacaggtatctggggcgcccggggctgcacacctcagttcggtattctgcacacacacagctcgcctggtcgggggatgggggaaaggggaaacacaacctgctgtaggcaagtccggatcccaaaccacttgggggctggttccaagggggtgggcgtggctgtgtttaaaaaatatgaaataatttttcttcctagcgaagagcccgaggtaagccaatcatttttacaaagagtacagtaggaggggcttggtttaaaaagatgggggttatgtgttgtgagtggaatgtcacctttgtgtttgaaatgcaactaaaataaaagttttcaaaaaatgctctgagtgtatttgaagtgtgtggacaaagtatggcaaaaccgtgaatatgacttgtgaaaacaagtaaatgtttgcatgtgaattttttcaggcagctttagctgggggcaaagaggcttgtcaaaggtaaggtcttctgcaaattggctctggatacaaaaaatatataaaggtattttgattacagaagttaaaaatcatgatattcttgtcaggagggtattttggtggccttctaccttccccctcctcctctgctcacatttccccacctctcggtgccctcccctctccaggatccccctcctcaccccacagcaagaccctctcctgtatctcccagtctttccctggccattcccagttccccaccctccccccagccccccaagacttcttaacttcaaatctggggcattaaatatttttgccacatttaaacaaagcatcaattagcaatggtctgaatatgtggtttaaatgaaaacttccaaacaaacttcacaagcttaatttttacattttattctctaagactttctctaagaccttccaagggatttcaagatcacagtttttaaggctgcgctacatttgttaaatatgttagaatgtgtgatggttttttattaatggcattattggcatataactgtgctattgtgatgtggctctcacaaatcacaattttaaatgtgaggatcattttgtgtatgcccatccaggtagatcatgacattgtcatttacctaaagacatataatatggtcgttgttttaaatttcaaatgtctcaactacactaaagctaccaaacattaaatgacaatgcactggtttccctgcagacaactgattttgccataacagacccatttcaatattccaagcacagctctgggaagcaaacctgtagattgggggtgggaggacataaatgcatacagacaggagacccaagtgacagtgtgcacctgacccctaattgtcaaattggtgatgtgccttacatgcggggcctcagttgcctcctttgtgaaatgaagctttcctagcagatctccactaaggaatgcttttgcaccatgatttgagtcttctattcttcctggaggtggggggtggaggagacacagtctacttacatcaggactggagacttataccatagattgtgcagccatcaatcctgcagcaaactgtccatgtttgggaccagtcttaagaatattagaagtttcctttgtctccccttattttgtcaccaggagtaaaaattaactttaagaaaaggaaatttgctggggtcaccttgtaccttgtcctggctttgttctcgggtgctggtagccaaacacctttggatgcagcatagtccagaaggtgggctggcaaaccatgggccatgtctaacataagcctgaaatatgatagccagtgttagctgctagctgaaactgtaccactgcagtttgtcaaagcaggctacagtttttgaccaggcttccttttgcagaggtgacgtacctcttctggacctgaattattgatgggggacagggagaggaggaaggatgaggacttactcacatgtaggacaagactttttactaactttttagtcccaacatataaaacaagacatccatacatccctaccactgaaaatgcagatcaaatggctgtcctttgatatggttgctaatttgtgacatgcagattcatctgttgcttgaaaaaatgtatgttcatgtgcttatcctttctgtttttattgccgggacaatttaatctcattacagggaatcctaagaaatcaaagagagagagagagagagaaagatagatagaaatcagtaatatgattaaaattctaaaatatctaaagagttctttttaaagaagcctttttcttactcaacactatccaccaatagactgtttccatgtttctgttacgtttttaaataattttggtggcttaaacattttttaaaacttcatttaggtgtgatttcctccttaagaactgaatggggctaatagatcagagtttcttagtatctgccacatttattaaaattgtgtaggcaaatgctatatataataatggctattctgctatgatgctttatttatacagtgaatcacaattaattgtatgattatttatgccaccaagtgcaacagtatgcattgtattccatcttgcagaagcacctttttatttttcttttctctctctctctctctcttttttaacatacagccatttttttatattctaaatgcctccactgagcttttggtgtggtaggaaggacatggcttatcaggccacaaaattttggagtccagatagatttattattttctcttttcagtctcctagtaagattcatgcttctcaaagtctgaaattctaccttggttttaattcttacagatttctctcaaaaaaaattttcccatataggtagattaatgtttaaaatttacccccattatttacaatggaaaactggttttaagcaaaaagaattgggggtcatccccttactgtatgtatcctcctaacttgaaaaggaaaatctcactgctctcagtatgattagtaaccagtaataataataacacattctgattacattttttgtttgtttgatttgaaacaaagtctccctctgtcacccaggctggagtgcaatggcaggatttctgctcactgcaacctctgcctcccagattcaagcaattcacctgcctcagtctccagagtagctgggattacaagcgtgtgccaccatgcctggctaattgtttgtatttttagtagagatggggtttcaccatgttgttcaagctggtctcgaactcctgacctcaagtgatctacccagcctcccaaagtactgggattacaggcatgagccactgtgcctggccacattttacattttttaaagcctttcatctagtcatatttgtctcttgaaacagtcctgggcaataaaaacgtgatagggccccatttcataggcaaataaaccaaaagctcagagattaaatatcagacacttttttttttttttttgagaaggagtctcgctctatcgcccaggctggagtgcgatggtgtgattttggctcactacaacctctgcctcctgggttcaagcgattctcctgcctcagcctcctgagtagctaggattacaggtgcatgcaccatgcccggctaatttttgtattgttagtagagatggggtttcaccatgttggtcaggctggtctcaaactcctgacctcgtgatccgcccgcctcagcctcccaaagttctgggattacaggcatgagccatcgcgcccggccataaggcacttttactcaaagactgcaaggtaggtaaaggatcacaaatttcaaattcagataatgcttaccagaaatgtgatgataagctataaagcattatttaaatgtaaagcatgattattctaagtatactatgtgctcttaaaatcccttgccaaatgacacgtgtcgagtagtctgctactttctgaattatagcaaaacgcacagatccctggttataaatgtccattgagtatacatgaaacatgagctcccccatttctgagatggctgtcattgctttggtaatatttcatttacacatttgctttaactcatctgccagcactgcaacgttgcagtcttagtttgttgggctactgttttcctttttttttttttaaatgcaggtttttttaaaagttttttggtttttttgttttgttttgttttgtttttttgcagggtctaaagcttttcttcttgtttaggtttccactaaataataattaatcattataataataaaatgcagttacttttctgcatagctctattataagtatagcgttagaatgtttagaatcctggtctggatctcatgatcttatcaaaataactctgctccatagtctttgtagtgatttttttttaaaagtatgccttacttctagtccaggctaatttccatttagcaagagtcagtgcgtggtcttagaaatcacctttgacttttatgcaggaaggttagttgttgttgttgttgtttttaagatggagtctcgctctgtcacctaggctggagtgcagtggtactatctcggctcactgcaacttctgcctcccagttcaagggattctcctgcctcagcctctcgaatagctgggattacagacatgcaccaccacacctggataattttttgtatttttagtagagatggggtttcaccatgttggccaggatggtctggaaatcctgacctcaggtgatctgcccaccttggcctcccaaagtgctgggattacaggcatgagccaccgtgcccagccaggaaggttagtattaagcaaaacataaatttatttttagagaaggtaacctagatttgaaattcccaaaggcagccatgctccttcttctttttagagttagtttttcctccaaataaaacttacccccaaccccagcaaaattgtggctcttcaaatgcctctaaataactctcaggagacacatcagtagtgaacaacaattcgtttctacacttcttggtttcttttagctgtagtagcaaatgtgaggttcctctcaaacccactcacgccatttgcccatttaaaaatcaaatttctcaggaggagtagcaattttcaagagagaagggacagggccaattgatgtcacaaggtcctcaccatcaattaagacaagtcaacggagggaactaaaagcactgggcagcctaattgaccatctctgaccccttggaatagggactaggagactctggccctaacacgcaccttcacagatttcattaaattagactgaatggagcttttgttcccatcagattcctgttctggcctgtggtcaccctaagcataagatcatgttctctttaggaaggaagaggagaatggacctgagcctctctttgggagttctgctgaaaagtctgcaagtcctaagtggcctttatgcaatttagagactggaaggaaggcacgaatataaattgggggaaagaagcccctgaacaaaggagaggagaggtatttcaaaaagaggatatattcttttttttattgagacggagttttgctcttgttgcgcaggctggagtgcagtggtgcaatcttgtctcactgcaacctccgcctcccgggttcaagcgattctcctgcctcagcctcccgagtagctgggattacaggcatgcactaccacgccccactaattttgtattttttgtagagacggggtttcaccatgttggtcaggcgggtctcgaactcctgacctcagatgatctgcccgcctcagccacccaaagtgctgggattacaggtgtgagccatggcacctggcctttttttcttaattcccccaaaaagagggccagctactagaagcagttacaatttgagaaatctggagtcttttttaaagggtaacatgttcaacccagtgcttggcacatataagtaccccaaaacatgttttgggttttttgggttctttttgttgttttttgttttttgagacagggtctcactctgtcgcccaagctggagtacagtggcatgatctcggctcactgcaacctctgcctcccgggttcaagtgattctcctgtctcagcctccccagtagctgggattacaggtgcctgccagcatgcccagctaacttttatattttttagtagagatgggatttcaccatgttggccaggctggtcttgaactcctgacctcaggtgatctgcccaccttggcctcccaaagtgctgagattacaggtgtgagccaccataccaagcctcgacttttaattttagaaatttattttcctcctagatttttttttttctccctgctccaagtgaggttttgggtttggttagttttctgttgttgctgggttttttttttgtttgtgtctttgtttttctgttttttgcatttctcattagactattaacatgtaagttctaaaagtgccagccatctcattctgtctttctgtctccacctttcagagtacattctttgtttacattttgtaaataaaggtcaactcaagcagtagacgaatgccaccttgccacatttataattgtgtgaagtcactctcaggtgaatgatgtgccagagagagatgaggagataacttactttttgacttgtcctgtaaaagtgtcacctgtcacccctgcctatccagctcccccttctgttttgattagctcctaactataaatcaactcaataccgaggctgagctcaaggacctgagcttggattgttctatggttattacacatgaaaaaaaaaaaaaaaagaaagaaagaaaatgtgtttagtttcctttccaacagccagatggtgaaccaggccagctcatgggaattgaagatgaagagacctccaagaaagaggtagggaacaacacaacaaaacaatgtttgacttttcattatgttgatcgtcacatgctctttgagcacacacgagtcacacacctttcaagttagaatcagtggagcgcttttctacatgcaacaactgggagctatgctatgggaagaatgttaggcaactgatctgtgacagggcaatggaaattaagggagtgtgcctctgttgtacttccttagagtaaaatcccaaattgcattgcagagtaatttgttaaacctcaggagtatttaaattcaggagtattttgacttgtggagttctgcccacagaactgcacattggatcttactaaatgttttttaatgattcaatttggggcgaggagagaggtataaaggtagtataaattgttatccaatctcaaatttattatgagtcagtcaatgtttccgacattgtcacacacacactgtgtgtgggacagagtaagtacttttaacttcctttaatgagttgataatgggaaggaaaaaaatctctgtactactttctaaagagtgtcacagttgagctttcacaagctcagtgtcaccactgagtgagcatcgattcttacaaggaaattaagacttgggctgcaagagcctcgcctctctcttctgatttatctggctcttgcctctccccctccatcaaaagaccacactatctctctcctcttttccatttgaacgattttgccattcatcaaactgattgctaatgtgcaaattacatgatggtatttttacagggaacctgcattcaggtaagtttgaagctgtgggatatttgagggggaaaaaatgaataatgcttatcatgatccacagaaactaaagtcaggcattgtaggacagtccagaacccaagaagggccatggacaggacccttccaaaggaaagagaatctcgtgtcccgtgtgttagcgagtatccattccagctcccccagggctctgggacccacatatctgtgcctccatttttctagggttgtagtagctggtggtccagttgaaaaaaatgaaaacaggaaacctgtcaagaatagatagtgttatttaggaagtatataggtacttacattactgagaccacttgaacacatccttttaaatagataccttttttaaaatctatggttatgtaacatctgtgtccgagggatttaagcagaaagccctgtgggtttctcttttcaaaagacagaccttatttataatcagcccctcgatttttttgggggggccttcatgggcttttgaaatcttaggaagtgtccatcctaattccttatagctgctctttctgtggctctactagggccttcaagatgctgaattcacttattaattaaatcattgacgtcattcagggggttccttttgcccactgccccccaacatgggaatttttaaatgactggctctagaagggcccaaagatggtgaaggtgaattgatatttcaggtgaccactagatggtgagacagtataaggcagaaaacaggtggcacgtgtctgtgaaaatgagagggatggccagggctggcaaaggcaaagaagggtcccccttgacttttaatgccagcccccaccccaggacagaccttggattcaaataggccccaaagctttagccagaccagctttttacttttacgctgtgacttctcctagttagctatatgccaggattttagaagcattttggggggctcagtctaacagaggggtcctccaagtggctttattgacattttttcatggggtggttgtcctatgcactgtgggatgtgtagcagcatctctgacccctacctaccagacacacacacacacacacacacacacacaaacacacacgcacgcacactctctctctctctctctgacaaccaaaactgtttctagtcattgccaaatgtcacccctcattgataactactgccctaacatcatcagtatcaaattctggggacagttcaagatcatacatactgtaacttgcgtatcttaaaaatatatatattggggctgggcgcggtggctcacgcctgtaatcctagcactttgggaggccaaggtgggcagatcacctgaggtcaagagttccagaccagcctggccacgtggtgaaaccccatctttactgagaatacaaaaaattagccgggcgtggtggcgggcacctataatcccagctactcaggaggctgaggcaggagaatcgcttgaacccgggaggcagaggttgcagtgagccaagatggcaccattgcactccagcctgggcaacaagagcaaaactccatctcaaaaaatatatatatacacatatattttatattatatatatatcatatataatacaaaatatatataatatgatatatcatataatatatacatatataatatatatcatctataatataaaatacttttttttttccagagaaaagtttgtccactgcagttacttttttttttgagatggagtttcactcttgtcgcccaggctggagtgcaatggcatgatctcagatgactgcaacctctgcctcctgagttcaagtgactctcctgtctcagcctcctagtagctgggattacaggcatgagccaccgtgtccaaccctgcagaagtaatttctagaaatctcagagaagaaagtgacccagatgaccctaactagaatagaaaaggaaattatttcagggaagtaaatagtgagctgactttgattaaccaagtcagtcccatagctaggctaaatcaatgcttaaatagcctttacccttaaatgatcacatcttccacttagggtttcttaaggatgccttttcctgtagcaggctaggaattctctctctgactggtgcacactcaattaattcactctgcattgtagagaaggatgccaagacacgaaggacccatctgtcagatggctgctgacaacgtatcagctctagggtggcaggagccccactttatatgtgttccccaaaacaacagcagagcctttaactgataatgtgtacacaccagcaagcagtgtgtgggccccagttgctgggtctccctagtctcaggcccatagagaaccagcctactgcatggaggtgacctataaactttcagcaactgatctttcaagacagacagttagattgcaggagagaggggcagtggaaggaacggctctgaatgactggactgagaaagagcataagatctctcaggaataatacatagctaagccaatagaagtaacaatccaaggacatttcctggtcaagagtcttgcgcttggtctctgataaagtggacacccccttctccatcctagggcagactctgtaaccattatttcttggaataatcataataggactaaattgtgatcttaattttaaacagtggtctaagcccctaatttgcatctgaccagcctctctcaagtaaccattatggaaggggactttataacttctttgttatattttgacataacacatttacatttttgcccccatttggtctttctatagagttttcagattgtaacatctgaattcatctcatcaagttttcaaattgaaacatctgattgtaacaactgaaacagattcattagggatctaattttttcaaacaaaggagatttttttcttttttttttttccctagggagtttcaaatttatgacctctgacttcattgcaaaggccagaaaaataaataaatagatagacaatgaccactctccactccagacatgcaggtgtatttcaacactttagcttttactatcaggatttctttaggggaaggtgtagaaatatattggtagtttgataaattatatatcagacatgtaaaatttaaagtatcatttgaaatcaaaacttgtctgaagactagctttttatgtcacaagttcagctaagcaaagtgtcccctaactataaaacctccttactgcagaatcctagaaattaccaaaggcaagcttcttgaatgttgattttgaaattttgcctgcgaaagtgcaacatctttccaagcaaatgcttagaagactcagggcagaacccaaaaacaaatgccagacgttaggggaaaatttttaaaagttggattgccagaaaacttctagctatttataattaagcatttttagctgctaaaaggaagcacattagatcattttgttttgcaaaacaaatggccagtgtgggttttaggatggacactcccaggagggctcccctttctgagtgggagtctttggaaatgttcctgatgggatccagtcattctggagcgctcttacgaaatcgttcatcctagggcagtttggtgtttgtgagcttacagcgtttactccttgctgtcttctaccataggtctgatctgatgggggaggcagtgggcagaggagctccagctctttgggagggtcctagaatagtacaaacagcactgggttagaagttgggggttctcattcctgggaccttggttgattatagaactttattctaggattccatgaatttgccaagctgacatcgggaaaaggctaaagtttgattcttgaaagtattgacaaggccccatttaggaatgattctgccaagtattcctggggtcctgccatggtcaggagagcaccttaaatttgatgagttgtcagggaagaagcagagggtatctctgtgttcagctttatgtatgagaaagtcaagacacaagatgggggcaggacagggacagcttgagaaaggaggcttgagattgagacttggaactcaggtgccagggatgaatccaaaaggcttgcaggcatctcagcctcagacttaagctaacatatagcagatagtggacacctctcctgtttctttctttcttttttttttttttttgagatggagtcttgctctgtcacccaggctggagtgaagtggcatgatcttggctcactgcaacctccacctcccaggttcaagcaattctcctgcctcagcttcctgagtagctggtactacaggcgcacgccaccacacatagctaattatgtatttttagtagtgatggggttctccatgttggtcaggctggtctcaaactcccgatctcaggtgatccccctgcctcagcctcccaaagtgctgggattacaggcgtgagccaccgtgccctgccaatatttgtctttttagtagagatggggtttcaccatgttagccaggctggtctccaactcctgacttcagatgatccgcccaccttggcctcccaaagtgctgggattacaggcgtgaaccaccgcagccagctttttttttttttctggccctgcaatcttgattccccagagttagggtctgatttcagatgttaaggcaggctcaaagtggggcatctgctcgccacaagaaggtgagaggtcagaaagaagaagcaagaccattagggctgccttagttgaagaaagggggctcatctctcattttctcagaagtttcacaatccagaaaggggagaacggaaagcagcctcctaaggagttctcgaatttctttctcacttttcctttgttttctcgctctctcactctcttctaagatttatttttaaatggggttcttattttggggggactttctgagcaggaactaccttttttttggagggaaataaatgagaacacaaattattcagggctgggaagtggaaacaatgaaagaaagcaaggctactcagaaccggctggcagatggcgctcggcttttacgattgacagcctggctttcaaaaattcacccttgcgccggcgcctaaggcagaacccgcatccccctccctaaatcctccttcccaaggacacggcccctgcccctaaggctgaggaatgtttttaaaaggtttcagttgagcaattgacatctaaggacaaatcccggcaacttttaacgagtggatctgaagatcttagccaaggcaggaaagcacacgatcaggtaacctccagattcaccgccctggtgccccggttctcctgggaactggtcctgagatcttggacaaatccctggttctagtttttctcaattgaaaaaacaggagggatgtctttctcactttaaaacttatttaattatcttataaagtttcaatagatgaggtatgccaaccccctatccaacacaaatttttttaaatgtctgttccaaaatggcagattgtataggaaatcaaatggtagggccctctgttgtcctttggtaaataattaatagtttctgggtcccaatcaccgggagaatctttgtgggagcagagtttggtggtaaactctttcacacctcaatcaagggctagaaaagaggttcataggtgagcagagctccagtttccaccagggaaatctaaggggcctacctggagaagttagcatttaagacaatatggagagatgaagtagaatttgaggtgcatggtcaatgattgtttacagagaagggacttgctagggatacatcattgcttttccattcatgcaagtatcattgtgtttttcaggatctctgagacctcagggctagttttaagttcttcccctcctcaacccctctccacttctcagtgcttcacggcacactggggcattctcactagcgaaggtgtcctctctaaggatgggacccctactgtccatctcaggctcagcactgccttggggcaggccacttctggcttctttaggcctcgtttccacgggaggggaagctgggtccgatggtgtctgggtcaaattccttggttccaagaacaggtaccgttgccattcccttccatttctgccccctgcaccaccccacccagcagctggaaaatgatgaggtcatctatttgagaagggccacacaggcctcccacacaaggacctacaaagtcctccaatgggaatttatttctttctgatcaaatttaccctccataccccattcatatacacattctttctcccctctctcttaagattgtaaagttaaagaaactgaatacacagggttgatttaaggtaaacgtccctcccacccatctatttaaaaaattttcttttacttgataactttcctacaacatgattctcttatgcccatattcctctgaggattctttaaagcttttcttgcactttctcctcctcacagtccctgacttctagccctgagtggtggctgagggcaggtgaccctgtagaccgtggggaacagaggaggccagggcaggtggctgcctctttccaacctttcctgggccatgggagctcctccccaccagaggtcagcagagagctcagaatggctgggtctgctctcagaaattgggatcttggaattctctagatgaaatgtaggatgcccaaatggaaaaaaagccccatgtttccagggtgttttggttggggctctcatcctgtcttgggtcccggggaccttacttttaacaccaatacagccattctgtgcttttctcaggggaggggtggttgggggtttggtctgtttatttggtggctttcttggtcagtcttctccctgcgccagacgcacaaatccctcccttagagggaaccacaccctcttagaactctcccttctggggcccaactgcccactttcgcttcccacatgacatggaacccacatcccacacttggccgggcgccttttcttctagttgtatttattgttaaaatgacatcataatattacaggaaatccccccagcctaccctcaccctgctgtgattttactgatcattatctccccctgttctttactcaggtgtatgcatagttttgagagggcatgaatcatggtgtgcagtttcatattaatccccctgctccacaaacacacactacaggacagtttccttagagctcttccatgttcgccatcgtccttccacagttctttcacttgttcagtcctttcgctagcggggaagagcagggaaagaattgaggttccctccctttgtttttccttctctgatcttttgaaatcccggggtccttgtgaacgactcagaaattaaaaccaattccctttggccagttgtttattgttgaaagagagagacaaagagaaattaaggtgcaaacggaaggaaagaagtaaatagagattaaatttaaaaatttgaaagggagcagtggttcacgcctgtaatcccagcactttgggaggccgaggtgggcagatcacctgaggtcaggagttcaagaccagcctgactaacatggagaaacatcatctctactaaaaatacaaaattagctgggcatggtggcgcatgcctgtaattctagctactcgggaggctgagacaggagaatcgcttgaacccgggaggcagggtttgcagtgagccgagattgtgccattgcactccatcctgggcaacaagaatgatactccgtcgaaaaaaaaaaaaaaaacaaacaacaaaaaaaaaaccaaaaaaattaaaagggagagagaggaggaaaaaagagggaaaggaaagagagaaggaaggaagaaggaagggagggaggagggagggggagaaaagaaaagaaaggaaaagaaaaaagagaagaaaagaaaaaagaaaagagtgcctttgccaagtttagctctaagcaccaaatggggtccttgccctctaggaacttctagtccagaacagaggagaggatcaggttgcaagtgattatccttctaccaggcagggggtggagcgctgccaaggagggtgtggctggcacagctgaggggccaggctggctagaccggacaggagtacggggaggagaggcaggttcacaatccaggctggggcatcctctcctccccatctcactgccccatgaggtcccttgttcgttcaagtgccaaccagaagagctgggacagaggcctctcttgtgtgccaagacgggggccaccaccaccctctgagctctgaccactgccctctcacctcttattgctttcccaagtgtttacctcctgattctaaaacgatggtccaatttttgttttattttaaagttaggaacacactgcatgtagcacacttcatggagcacaagtgttttcacatgccttatcccactaagtggttttgttttgttttagaaagtctggcacacagagaaccttctagttctttaaaaaaaaaaatcataaatttttaaatttgataattatccagaacaaaacaaagcaaaccctaaggttaaaagtgagcatcctataagttaagtatagatctttgatgttggggaaacctttgaattttacaaatcgatgtccttgagaattgggttccagccagacccactgtaggcattgttttctttttttctttttccttccttcctcccttccttcctttcttcctcccattccccctccccactttgaaaaacaagttttattctcttgggttatgttcattagagagggaagacaattctgttcagcaaggaaaggtgaggggaagagaaaaggggggaattcagccagaggagaacagggacaaggttgattgctctgtgctggggtgagggtggggggcagagagagaacatcacagccagatgcaaatcacaagagcagaccttcagcttcctggcattggtggggaaaatattccgtcagctgcctttctatgtcctgggcttcattcatcagctcaagagaaaaaaaataaaatcaaaatttcatcctaatttgttgtggttggaccccattctcccacattttggccttcttgtaaagcacaaccacaaaggcagaagtggcttcctgggctgacctgcctctcagttcattctcaaggcgttagcctcatcccatcaggaggagttcagactctccccaagcaccaagagttagaaatgtgttgctaattgatttgagctaaatttgtgttgctttgagacttagcaaaatggctgattaggggccagtgttggggaaaataattgctgatctaatagctatgaaaaggaactcattcacaaatatgtttataaaatgggccttctgtgacattttggaattgtcagggagttaggggtcacggtggttcttcaggaagaaagaaatgttgttgggaaatgtttagtggaaatttagcataaaatgacatgcctaatttaagaaaacagttaaatccatcatggttccaagtgaaaacagttgtcacaaattaatttttcaaatgtttgactattggcaggtctgaggtttactcatctgtaggttatgtccaacttggcaaaagcatggaatcctgcccagtccttggtacacagggactagcacatgtacccattttttctcactgataagttatttcctaattttttggttaacttgaaggtcgaaatagccttactcctttttgtctgtctagtagcatctctaagcttgcagtagctgctcacgtgtctgccacgccccttagaaggacgaatccttgcctggtcggtgagtttgcctcaattcgggcattttcatttgttcattcattcgatatacatgtattgagtgccaaatatgtgcccttccccgtggggaagacaaaagtatgagacactgctactcccttgatggaatcaaaacaaacccaggaagttaacaagagtgggcagtctctgctaagcgattacacagggaataaataaggaaagatggaaagattgtcaaccaaaagacttcaacaacctgctaagagtcttccagcccagttgagcacaccaaatcagaggttacctaaaagtgtcatgagtgctgataattaaactgcagaaaacctagaaggatctgctggggtcaaaacaagcaacatttgacaggcacagccattcagattttcatgccactctgaggctgaaaatttctgcacaaacagcagtgactgaacctttgctagtcacaggatagacctccctgttgatagggtagacctccctgttgataacttgtcagtcatgggactgaatgaggcctttctccaggaggcacagcccagagggttactggccatgctgaggaggcagtcttgcttccaggaggggctgcagaggcctggcccaagagtggtgctgagaactgccttttgccaacttctttctttcattgtgcactctctggagccaaactatgccttccaggatctttcaagactaaaattctcttaggaagatgggcccaatatttcccacctaaccttagaaatcttctatgtctaggattagtgttttgagagttagatgggaaagtgtagtttgcagccagatccttatgtactacagagtgctttcaccttagtgctttcatcctccatcttagctccaaccctccatcttagctcttgggctggcccccgtcttagctctagccttacatcttagctcctggcctgccctccatcttagcttctggcctgccttctatcttagctcctggcctgccctccatcttagctcctggcctgccttctatctttgctcctggcctgccctctatctttgctgctggcctgccttccatcttagttcctggcctgccctctatcttagttccagtcctccatcttagatcctgagctttgggtctcttttgttttgttccctaatgcagatagagatagtctatattcaaatactataattaatttccagccattgtggaatgaaaaacacattttaatttccagaatttaatttccaactttcctttcacaaatacttttaaattatctatttattacccttgaaataatatgtcttatggataggtctctgtaactatcacagcatatgatagtgacctttatgtttttttgaaaatatctgtgtaatacagattgctagctattttttatgttaaaaataagacaagggaaggttgtctggatgactgaactgaaagaactctcaggtgaactttgctccatagtgaatatgattgagatttatagaattattaagttgtggcttcttaaaaattgccaccgaaacaagaatgcctgaattttgtgttctgggtgatcgtggatgagcacatggcacatctgaaaagtgatttggccccaggcctccttacctccctgcaggtggctgtgttctcttcagttaatcccattagctggcaaaggctgatgaggctactcgtaagggacatgtgcattttcataaagagctttagaggcccaaaagcccagagagtcacatttttaatagtggggttcctaagagtagcattctaacaagaggcattggggggaacaggggagagcatttgggcagtcaccccctccccacttctagttccagccccataccctgttttcccaacccaagtctatggctgcctagcagccctctaagcaatgagttgactttcttccactgtgaccccaggacacgtggacccctcacaccagatctccaagtagcagcatagtgcttagtgttattctgcctggcagcggggtgccccccccaccccattcagtggcagtcaggttcagatcgtagccttcagggtgcctgactcattccggctccggtcgataatgacaagccccatgtttttctccagcgtccacggctatgacacatacaacagtcaggaaataaaagaggcttgagtactatacggttgctttactttctttaaaaaagaaatataatgtgaagggcatgggggaaggagcaaggaggcaggagtccaggccagcaaataagccagcagcaaaacaaccttgttgtttgtatgttacataaacagcccccccaactgtcctgcggttatatccttaggaaaaactggggcttagtggcgcttgggttgatttcacaccttagcttagagttactcagaggtgtattaacagctaatgattccattgagggcggcccagattgccatcttgacttgccagatattagcaatactcttatagaaacccaaaagcctgccaattaagttccccagtgtaagttaaaaggggcctttctgagatgcgtgatctttaggaaaaggaaattaaactaattttgaaagctcctaacactcgagtttccttataatgtaagtaggtgacagctgggatgaatattatgagtccctcccataatgtgtatttgaatagatgtcatggattctaatggcagagttcaaagtcactcagaggggcgggtttttatttttttaatgtcacccacctgaaattattttcagaaagttctgtaatggctaacaggattagaatgacattgtcacaaaatgatatgaggtgttaaaaagacccctacatgatgcggtgtccacaacgcacaagaagtacccccccacccaagcatgactcagtaacactcagtgaggagaagagcatcgaattatataagttacagttttatttcagacacacaagcacgtaggccagcagtgatagtaaacatgcaggcatgctttccctctgagcatgagaggcgtttggattttaccctcccagatgcagaacctctgtacttctaaacagcttcctcctgacccttagctaagtcaacggggaaaatcagcctccaagttttgctaaattgtgtaccatgacagtgacttgtatttaggagaccttgcgtggatctaaagcccagaagtagccaccaccaccgttcctcctgatgaaaatggcctcaccagcacctcgctgcaaacagacaccagctcaaaacattgattttctccccaccctcgcagggttaggattctgcttagaactctgctttaagctaaaatttccatcaccaaagggcctgatttcaggcagagaaaggaccactttagcaaatgagagaagcgaagaggagtggaggaggagggtcatttcaacagcagcaaaactcagccatgccattttccctgacagcactttaattatgatgaaagaacaagattttttttttccggtttttacagaggaggctcgtggtggggggaaaggagggggctctgaaagagatgtgagctgccaaggtacagagtgcaaagcggctgtcactgccaaatgacagatgcagttggagagggggagagaagcccttccctgagcctgtgcaccagtggcctattctgtgggggcccaggactagtcagccaggggcaaatggtgaataggatggcccaaaggagccacctgctacatgctagcttccccctttccttccgtgagattttaaccccagggctggttctcctagttgtgctctgctccaccagctttgaaagccttggaggggtttcaagtggtcacataccttattgttgaaaaggatgtttttctttaaagtcaggtgctaagtcaggtgtgaggttgaaatggacacttaagggcttcagagcaggataaagggacagagcccaggaagcccaggactgatgctctgatgggcagaagccagccgtgttttaggaatggggaaagagttggagcaccagatgttaagaggctacagtcagctcaagcaagaacgagagaacggcgctgtcactgacttcccacctcccggccttgccggtaatccctgctctgattggaggcatggggtccacaggaggcacctattgtgttgccacaatgcccaaaagtggcctgagaattctgggctgctagtgtttagaaagagatataagtgaaccctagactctcacagctggaaaaagcctttcttcctgggaatgggaagtaacaaaatgagtccaggttagctgtggagtccttagagatgaagggagcagagagggcggaaaaaaaacaaaaacaaagaaggtgcattattttgtgtttcctttcacctccctccttggttttagggccctttcctggcatgcaacaggaagtgcaggctgtgttgagagcctctggtgcagacttacgcagagcacaagagatgatgtgagcctgcttgtctgggctgcttttgtgtaactgaattacacagtatctatgttagaagtgatgtcacccaagagagccccatggccttgaactaaacaccaaggggcatcgggccccggccccaggaggcctgctatgcagcaacttttctgaacaatttgtgattttctgttcttattcccctcactaaattgtcatgctgctagagacacttctaatttgatggttattaatgggcagctggtaatgaaacagcaaggacttagggctttgcagtaggtgaattacggacatttacaagtaaaacaactttacttcttacatttagcaagaggtttaacaagcaaagtgcaacatctgcagaatcttatgggaggaggcagtggtcttgaaattgtgaggcagtactgcagggatagagatcgcctttccctagaacaactgcaatctccccatcagagccaactggaaatacaaatttgctcctatctccatgcgtggtgattctgcctgctacagagatggaggaacagtgatctggctgattttaatgggcccatttagggaaaaacacttaaaaaatatgtgaaaatgcattttccccctattccttctggaaagcaacattagggtccggcagttctgtctggaaggagggagatgcaggagcagcatcctggcttatgaccgcgtggctgcttagtggttttattttagaaagagttttaatgcagaggcagcggtggtggtgggggtgcgggtgggggggggagggagacaaatcagatgtagaggtttgcagagcctggaggccaaaggaagcccacttcaggagaccacattttcagcatcagaataagtaaagtatttgaggatttttgtctcctcttaaaaataggcactttggaaaaggaaaatatgcaggcttttgagaaacacagtgaggtgatcagttaatgtgaggtggtggtgattgtaacgtcggaagaattggtctcatttttcatgtcacaattaatattgtttgagattagatagcttcttaatttagaccatttacattttacagagcactaaaaagcaagcctccaagccactttctggcagcacaaagccaaataaatgggaacaatataaccttaaaaagatccattctttcacttgtagctttgctctggtcaatatcgagtcatttagcacaatctaaaaaactcacatttttcactgctagaaatatgtaattcttcctactattcattgcctgcagatgtcctgttctggggacctttttgacttgggtttttgtcttcttgacaccaaagcatacaatcaatttggtcaaaagttcaatcgtgaaaaagcatctggatgttttgtctataaacaaccagtttgcctgaatatttgagaggatcagctcagccaaccacctgtcctgatgttaccccaacacagcccaaatgcactcagaggggtgcggaaggaagggtacacacaaacaaggtgtgggggtctcgctttctctgctgcagccatctgaaatcggctgcagaggaggggggaaatgaagcagcaggctagtccttctaggcagacgtggagagagaaccgtgtggaaagatatctttatggctagactctcagcaacatcactgtcagaatctggtgcctgcagccatcttagaatttagaggaagctgaaggcacctgcccacattttgtcttaggttacaaccagctcaatccagccagcaaaaaataaggttgagaagcatttcgcttttacagaaaaagaaaaaatttccatgattctgttccttgaaaaaaaagctgaccctccccaacccaaaccttttatttcaaagtcaccaaaactgagactagataatctctctctctctctttttcctcgtgtgcatagccagtttagactctcttggctggaatttttcctgatctctcagtgcagtaaaaagccaggcagatgggggaagaagggaacatggagaggcagaagaaggggcaatggctccttggcacatctccctttgtagttcagtcttacacagtccatttttatttgcaaatagctcagcccaaaagagggtattgatatgacccccagatgctgttccgaatccatcttacttattttccctcgggggtgcaggcagggcagagcccagatatgatcagaccttcaaagcgcagccttgatcctttatttttcatgttacagtcacagaccttgaaaatgtgttttcagcagtttaccacataccgagaatttcaggaaacaaaaggtcaagaattgatgacttagatttattagtggccccattaagcagacctcagaattctaatgatgggtctttgctagacaaatcaatgtcatgtttctaaaaggacaagcgtgacagctgggtgatttcacagaattatcaggtattgggaggaaggttaagcaggggttcaattactatcaattacaatgatgttcttgtttgtttccctggggttttcatgctgctagttgtgtattttttcccttgcatttgcatatttgctgttttgctttacatgttttagaaattatccatctatttttttttttcctctcaaaatctcttctacctttggcatcaattgtagaaactaaatgtctgctgtagagttctatcctttagtcatagttttttgttctgttttgttttgtttttaaacaaagttctcttctctgcctccccacccaataaactgagtggatgtatagttatgccaagttgtggaaaacacatttaacacatttaagaacgtgccaggtatgaaatataaagtatgttatacctaagattaaaatattaattcgatttggggattatgccagtcaacattttggttttacatgcattcattcaactaacttatggtatcttgttgaaatgatgcatttaaaataattactgatttaattaaaagaaaactaaggaacttttcaggctgagaatgacattaaattatcctgttcttgagcgcctcccagaggcgtgggttaaataacaccagaatatgaattgagggtcatttcggcttttctagactttgggatgcctccaatggttatgagtaaaaggagtggtgctttaacttagagattagatgtctctgggtcccaattaagttttatatccatttcctttgtatggttgagctatttggcaccatcttggcagaagacagggatccagggcctttgctaccagtggaagggattgaggaaagcttcctctgtgataagtcttggcttggcaaaacatagcctagccttcttccttccctctccagaccagggcaccacgtggagatagcgccgtttgcttgggctggccttggacatttcagagttcccctcttactacatgctgacatcatcccgcaactccccatgtgccttccctcactgttgccaagtgctcttgaaagtcaaccaccttcctgggtgactgctgctttctcacctcaggttaaacccatggacccagtgaaagttctcccaggggctcccatacccgggggtaatcataccttccatatgtgaagggctagttttccagagtttttatttcttggtgttaggtcactgcaaccctgggataaaaatagatgtaattagcatgttgcagatcagactctgcacttgtagctttgtgccactttctctaataataccaattttggtgacacatttcctagaatcctggacttgcttcaatccctaaaatcctccaagagctgaattgtaggacaaacctgtttgctttagaacctagaagggctttgtcccagttagattgtctcttttccctacctttctagacattgcaggtccatctccattttcttttttgtttgtttgtgtttgttttgttttgttttgagacggagtctgggtttgtcgcccaggctggagtgcagtggcgcgatctcggctcactgcaagctccgcctcccgggttcacgccattctcccgcctcagcctcccgagtagctgggactacaggcgcccgccactgcgcccggctaatttttttgtatttttagtagagacggggtttcaccatggtctcgatctcctgacctcgtgatccgcctgcctcggcctcccaaagtgctggcgtgagccaccgcgcccggcctcatttttttgtttttattatcagggagcaacggctccattctcccctaaggctgacatttttgttgaaggctgagcacgcatgtcttccgtgcttgtggcaaaaggccctttcctggctggctccagaatcctcaccagttaattgggaaaaaatttgagttaggcatcacaatttcagccgagctgggcaaacaacgagtacacctgtcactcgagccagtgtccaaaactcagccccatggatcacagctgtagcgttatttcagcatgagcaattcagtatttaatgttccttagaaaaaaagtaaatcattccaagctgctactgttcacctattaactctttcaggatttcatggtggtggggtggaggtggggagtaatctataatttgcttggctagcagagataatacccccttcccaagtctgtctttcttacataatggccatttcttacataatggagaagaggggctgcaaaacaatatcctcttgatctgtggcagccactgccttccagaatgagaagttagattttcttctttcgtttcatttatatttttacctgcgcagtacaggtactgcttcctacgatcagcagcttccatttcttccctctttccacggtagcttaaattagcccatcatcatcagcaaatcttaatttacaattaagtgctgggaaaaaaaaaagttcgtcattaatcagaccttctcattttatgtaaatggcccccaaaagcaacacacatttttaatctgtcctgccgatagctgagcccttctgtcatttgggtcctaataaatgaattggccatctgcaattaatctgcatagtacaaatcattggaaggccgagtctgtctgccttctgaaagaaactggctatatttagttttttaagcaagtctgctttgtgttctttgtaaagtcagcgacattctttcaattttttcggtgtaattagcacaaaaggagccgtaatctgagaaggtagtagagactaaggcaaccgaaaaacaggaatgttcaagaaagcaggcagaggcagccttcccagtattgggcggcgtgacagagaccctgggacgtggctgtgggtagagctgaggtctgtagctcataaaaaatctccttttcatctgatccccagactggttgcaaacgcttgccgcttgggctgaataattttccccttctcataacttccagtggtcagcaaggaccttagaaagacacagtgccatctgggctctgctgttgagtgggctcctgacaggccagtgagagttctgtgcacactgccaagccctcaataaactgctgagtgggagagcagagggcatagccctgagctccccagcaaatgctgaatttcaaccaactggaggctacatggaaatcaagcagaggaaggctgcagtggccttgggaaggagagttagagcctgtacgaaaagagggggcagccctcctcattgggagctgtgcagactgtgccccgatggttagttcccccctcaaaataaaagccagggaaataggtggagctaagcggtaattacacatttttcaatttcaactaaaacgtgtgggcaaacacaaaacgatgaaaaggtatctacatttctagatgaattaaatgtgtgactaattatgtcacgttaattgcttaattcctggtttaccaacagcagatggaagtgggactggagagggggttttagctctgaaggcgaatgacacctgaggcccagtctaaatctcagttttcccaaactgaggctagaccataacggcagggctgtttgaaaatgatcacctacatttggttggcaggtagataaaatctgaagatgtaaaacttctatttagcagtcgtttcatttgtatatgtccacaaagcagcatttaactaaacaaaatgaattgcctgattaatccagtgtttttaactgtctaaactccaattctatggagctaaatttgaagaagtgaataccatgaaaaaaaccctaaaatctttaaaataagaacaattataaagggcttcttttatctaaggaaattttattagaacctcaggcctcctgactgggctcaatatcacatctccaggtgcaccaactgcctcttattttttcctgttgtcacttgtttagtaagatgttggatcaaagtgtcatttaaataaggcatcttgtaaataagcaggaaagtaaactggtccatgtctatttttaactagtctccctacattattctccatcctggatgagtttccatcttcaaggccaagttaaaagttctaagcaacaggttttcccattaccttagtcctcatgaaaatttttccccaagggaagtgaaggatatttcagtttaggaaaattagctttcctgccgtagagcggcaaaactcttaaatatttttttctactcaattaagagctccattaagtgggtccattgatctgttattgatgttgatgtacctcaaagaaaatggagcttcctcagtcttctcctggatttgactttcagttttggagttacttgtggaagctgccgcctgtgttctgctgatgggtctgccttttggtcctgctagtgggtttgttttctgctccctgttgatatccaagttgtgtgtccacctagaatcttcaatgaagggtaacatgtgcatcatatcatttaggcttctaaaaggaacaaagtaatacatgtcatctctttttgttagcttcccccttcttgaggtagatggtggttttgttaaaagtccattcctgcccacgctggggctcatggggatgtggtgagaaaggcactgatggcctggggaattgggcgtctgtccacagagaccaggaagcctctctcacagatggtgcctccccatcagagagtcaggaaagatcaagaagggctgcaaaacgtcctctttgccctcatattatgtgccatgcttttaagtagatgtttgaacagcatctcaaagccactggctcaagaaattgggtccaaatacactggccaatgtacgtccacattctgtttgaattagagtatgttctgaattaaaaacagatcattttaaaatgagttgatggataataaataggaaaatgtcatatggccatgtagttaattcttcagtaattgacttcaagtcttctgaaatgaagttttatatcatgtttagttttgaatacaagtttagggttactttatggttggagttactaactagtgaatatgacaagaaaaaaaaatgtcctagataatcactacattcgatttctaagaacttttatggtctaaagtaatagagccttcttacaaggattaactgagactaggaaatgctttttacaattcctgctttcatcatctgcatgacataggctttgatattcatttgcaatagcagtttcagtcattctagctaattaaagtgcagaacgtgctttgaagacaggaaacactgtggaagtgctaaatactattattaaaaccttacagctaaagtttctgtttcagtggaaacctatttattgtttcctaggctattaaaataatattataattacatttgctctgggctcttggaagacaacttaaaatgaccccaactaatgaaaggccaaggataacattcttgtccaaaaactgagtgacagcattaagcagaacagtattttcaagattctaagctgtagcaagtccactgcttcaaaaggtagacaaggcattcttactcagaaaggaggatacccaggggccaaggaacacaaactgcctttatcaccacgaagctgacaagaccacagaattcaaaccctgatgtgggacgttgttcattgttgtcaaatatggaatgttggaaagaaatgtttcgaggccatatctccatgtagtgtgtgacaccatctgtttaaacaagttttttcgttaggtgacctagtgttttaggttagggatgtgttatgatctcaactggctggcttgggcatgaagcaagtctcctgagccagagatctgtgctttccttgggcattttatacccaagatattctgccctttgtccctccctgaaatctccataactcccttctcttcctgagccagacgaggggccccttccattggaaagctctctcatctggactgttccaagagttatgccaatagattgccccactttcaaagcataaactaggtacttaaaacagtaatgatcaattaaattactaactcatatgaaaaggtcacacatggtagcctccaaaactaaaagacttgaaaaaaaaaaatcacaacttttagggcctcaagaggtcaaatttgaggccaaaagctcagtaaaatctcttctttcactttgtgtggagtgaaaacagacagcctagctgaccacaaaccagcttgtgtttcagcactctgggtgtcatttgcttacctgtaaacccatgattccacctgctgtcatttatttacaaagtgaatgctttatttatccatcagtagttagtcataataaaatataggtgaaacctacacttaaaaaatttttgttttgaagagtggcctcatagattgagagctgaaaggagtaaagcctgatcttgcgttacccatttctaggacaatagtcccaattgtgccttgcctaggacgcatgttagtatatgacatggggcagtttcactccttttaaagttcaggtgtgatgtttatctaaaaggggaaggtggtaatggagctcagagatttccaaataaggaggctcttcattatattcattgtataactttgtagctcctggcataagtatctaggttgtatttgttactatttaccttgtacctcttaaagacaatgtatctgtgctttgccacagtagaagcaggaaggaagatgcttttgaacaaatggagcataacaaaaatgtctggcctattcttccctcttacaagtctttaacaatttttaaaaatgacaatcaatcaaattcagccaggaatttttaatttaccatctaaagatatagaacctgtgctgtgtcatcaagcggttctaatttaggtggtggatggtagtgagcctcactatcactagtacaggcagcctaggaatcatcgattctgaggccttactgctgagttctcctatgagcacattcaggtgtatctgcacaatatttttatgcatctttggttaggtgaaaagcatcaacctaggatagttcctttgagcattttcaaaataaggtgtatttttgtgtggaagagaggccatccatgatcaggagtgtgacaaaaacctggccccaacttttcagccaagttcaagaaagtcaggggtctgcagcagcccagggcaggacggtgtctaggctgcgcttcctgttcttaattccaagtgttgtttggtgactttgaatcgccctctgttgtcttttcagattcataaaaaagaggccttgtacaatgggggcagcagtgtacctgaaggggccaagaaaaataatatgtggcatcttcatctgtcacaccttttcttactcgaagtggagcaaactggggaaaaggggggaatttcagtcatccggttgaatggctaacagtgtctttttattttcaaagctaacttaaaatgatacaagtttgctcaaggcctctggtggtatcagccgccccatacccctggggactgttaaatgtgtttccatttataggtagacttttcttttttctccttctccatcaaacatcttaagtttcatgggctctgttaagaagtcaaagaaaaagttggaagacagtttgtggactttgcatatctgggctttccgggacgtaggcctgtgtcccatccaagacactgctcacgtcttagcctgattacctggccgcctcggctcacctgggcacatggtgagccgcggaactggcaggcaccaaacatttattgaatgaataaaccgtatcccagcagacaccatggtggcagcagatgacctaaccaaggtcccaggaaaggcgggctggggtcaactgcttgaaaatttagtaaccctgctcctaatcccgtgcactgctatatcctagtgtgcggcgggacacttgagagttttgaaagaaccctcaaacaagttcacgttccgtaaactacttttccctctgttccagagcccccagggcgcccaggcaaggccgccacctctcccacctgggaggacgcctcgagcaccgactccacagccacggccaccgctcctcggctcccgtgacaccggcgcgcctgctgcttcgagcaggggaggctttgcactcccatcgcacttttctcgtccgaagatacgaaactccgtccgggcgtcgcaaataattcgaattcggctctctgacacctacctcggcgggcgcgcgccgctgggagggcggggtgggtggctggaggtaaggaggcgcacagcaggggtaagcgccgccgtcgcacactttgcacgccgcccagggctacaccactcaccgaaaattgggaggcaggtctgggaggcggggttgagcgcccaccgccttgggcgcgcccgcgccccccgccatcgcggcccccgcgcccccggcccacgcccgcgcggtcccggcaccggcctgcacccccagggtgcgcggcggcccatttgggtgcgtccccggtgggccgatttttcgcgcttccccttcggtttataggggccgctgctatgggtcggtcctctgaagaggctggggcgtcatcggggccggttagaagctctgctccccggcggggacactcagtcgcgtcggcaccgcggagcgggctgcgtcaggtggctggccggcgcggcgctcccctgctctctggctccgggctgcggcgcggcggctggagcgagcccctgtcccggcgcggggcggcggcgggcggccggcaggcgctgccttgcgtgtgagtgcacctcactcacatgtaagtcggggagcgccggggcctcccgcggaagtgcgagtcgcccggcgcaggcaagagccgccgggtccgggacaaggcaggggcgcccgggcgccgctgccttgccccggggcgcctccgggcaccccccaattctctctcttttctcttctccattggcgtgcccaagagccaaaccaaggagcgcctgagggtaaacagactcctgccatccgcgcctttgcacttttctttttgagttgacatttcttggtgctttttggtttctcgctgttgttgggtgctttttggtttgttcttgtccctttttcgtttgctcatcctttttggcgctaactcttaggcagccagcccagcagcccgaagcccgggcagccgcgctccgcggccccggggcagcgcggcgggaaccgcagccaagccccccgacacggggcgcacgggggccgggcagcccgaggccgggggcaagcagggagcccgggccaggcgcgagccgagctccccgaggtggccgggccaccatgctgaagatggccatgaagctcaaagcccgggcggcggagagcgagaagaagacggccgcggcggctgccgaggtggctgccgaagctgcggcggcggctgcggcgttggccgagccgagagagccgctcgcgccgcggaagagcggggaccccgagaagctcgcgaagaaccccaagaacccggcgcgggaggcgctccccgaaaagttcctaacagacaaggagcgcaagaagctcgagaagaagctgctggagcagaggcgaaaggaggagaagaagaaggagaaggagaggaagaagatggagaagatgctgaagaagaagaagaagaaggtgccagaagcccaggaggaggcccgatgccccgaggccgccgccgccgcggccgccgccgacgacgacgagggcgccgaggagggcgccgtcgggggcgccgaggagggcgccgccgccgggggcacgagtagggcctgggctgactgggacacggactcgagcgacgaggacgacgcctactacgcggcgccgcgcgttgggggcatcgtgtggcggcccgggccgctcaaggctggcgcgctgagcgcccacctgcccctcgtggtgttcctggtcttctcggtgcgcagcccctcgtgggtgctcaacttcctgctgcagaagcgcacggagcagggccgcggctgcggcttcgtgttcggggcgacctgctgcttccgagtgttcctgggctgcgccttcttctcctacttgggcggccgcgccaagcgcagaggccgcgggcgctccggggccagaggcgccttcggctcgggccatggcgcccggcgccgggggcgcgaggagcggctcatctagtcagaccccccaccccgccaccgccaccagacaccaccatcgctgtgtagtgtgggtttttattcgtgttcgtgtgtgtgtgtggacacattttccttttcggttgctctgtcctttggttcgtgctcgcctcgctttttccacactcctgctctctggctctctgtgtctctcgctctttcgaaaattttcctaagtccgggcgcgcgctccctccccttccgcccaccccagcccctcggcggcgcccgcgggagggggaggaggcctcgggggcgccgggcgacgcggtccggggggtggagcgttggcgtcgtgcgaggggtcgtcactggcgcggagacgccccctctcccccctcggctcagccgggctgctgcccgagcccggggggtggggggcgtctccccggcccgtcccgtccccggccgggcgcgggcggagggaccccctccccgggctcccggggggccgcctccctccgccggctcccgccctcccagccgccgccgccgccgcggccgctcctcggccctcctcctcctcctcctccttccacccccctcgccgccgccgcctcctcctccccccgcctccccccgcccgccgcggcgcttttggctcggggcggcggcgggggcccggccgaggcaataagagcggcggcggcggcagcggcggcagcagctcccgcagctcctgctctggtccgcctcggcccggcggcggccatcagccccctcggcctcggctcgaggggcggggagctgcgcgcgcccctcggtccgaccgacaccctccccttcccgcccgtccgcgcgccccgcggcccgcggcccgcagtccgccccgcgcgctccttgccgaggagccgagcccgcgcccggcccgcccgcccggcgctgccccggccctcccggcccgcgtgaggccgcccgcgcccgccgccgccgcagcccggccgcgccccgccgccgccgccgccgccatgggctgcctcgggaacagtaagaccgaggaccagcgcaacgaggagaaggcgcagcgtgaggccaacaaaaagatcgagaagcagctgcagaaggacaagcaggtctaccgggccacgcaccgcctgctgctgctgggtaagggcgggcggggggcgccggccccggcccgggggccctcgaagggcgccccgcaggccgcgcgcgccgagcccgccccccgccccgggcgcgcgctcccgagccccccgcccgttcgcgggctctgtctgtggggggcgaggccggaagggggacccaggggcgcggattcggccgggcgggggctcaaaaacggggcggggggccgtggcgacgcgggcgcgggtccccctcccccggcctgcccgctcagtgtctctctcttgctctcgctctcgctctccccctctttctctctttctctctttttccgcgaggcctacacgacgccaggggtttgggtgcgtgttggggagggggagggggagcccatggggctccggagactgcgacaaaaagagggtttcggggacaggaaaccgggtggcgggtagagggagggggacccgcctccgtggggtgtgagatttgttgggagagggaaagaggggaagaaaggggcgaggagaggagggggtgacgctggggggcgccgtggtggcggagggggcctcgccaaagggaggctttggcggggagaagtggccgaggagagtgggggggctggtgacatcagcccctcggaaaggatcggagcggtaaaggtggtgcagtgggggggagggggcgcaagggagtcgtggcgccggagtcgggaggggggcggcgaggggaggagggagggcggttgccgctgggcgcgacttggtgcgtttcgggcaggaccgactgactgtgtgtgcgcggagcagacgtgtcccgggccaggccgggccgtggaaggaggagaaggagagtcaaataaaataagaccaccccccaacaccaaaaaatggatagagttagtacgagaagtgcccagtgaagccaaatgacacgtcattttacagtgtgacctttttttccccttccagacttgcaggctttttcaaaagcagagcggagaattaattgtagcagctgccccccccacccaccacgagcagcgcccccccaacactattttaataaaccattaaaaaaaacacattttcctgctggctggccacattgagagtgctttgtgaaaagaaaaaacaaagacattcacaaatcagataaaactggagaatgacatttgtctgtaaatggcttcttggtctggaaatggcgtggtttctttttttttttttttttttttttgtcctcctcaaggtgggaggggggattgagagtgctctaaggagacttttcctccaggtgggaagagataaaaagacattaattagttgtttatcaagtgacatttagttgtttggttttgggttttctttttttgattgcgatttttcctctgattaaaaaaataataataaaataaaaaaaggttaactataaggagatggcctttcctccttttttttcttaaggtgctgttttgggggaaaaaaatgtaatgaaatgaccaaaagaattacacagcattaattaaaaatggaagttttccacttccttgataatttggctatctgaataaatttgtgaatttgctaggttaagacctagttcgtggtcacatttcaacaaaacagcttgagtataaagaaaataataaaaggctgttcttatttattttcctttggtggcttttggtttgctctttttgcataggtcatgactttgttctcctgggtccagatttataaaagcagaaaattactaattaagtcaaaataagtgtctttggtgtttatgcatttgcaatttcagtaattaaatggtacatgtgttgctgtcttgtctaaaacttttaaaggcagaattatgctgttgggatattagtatgcgtataacttgatttcaaagtataaatctggaaaagtctagaatcttttctgtgaatgctatctcagtactactttaagtcaagtgtgatgctaatgatatcttaaaatttccaacaccttttgtgcagtgatcacaaagtctccacttaatttgagactgttactcagaacacgccttgcgtcacgggggctaatctaagtgtcctagtctatatgactacattacatcatgatgtattgattgcctctggcctaggaatctgcagcttaagccagtgacacaatattttgcatttttaaatggtgattctcaccaaataatgcctccccacaaaagaggaaacctaataatgccccaaatcctctttttactccatcttaatgacataaaaattaagtgaattagagaactacaatgatcttaaaataatttttcagccacatttcataaatgtggaaactgaggcacggatctgtttttgcctatgaaagataggtcctgtaactgttacacagtttaacacttctgaaattagaatattagagatcctgctaaatattacgtattgtttccttggcctctcttaatagtgccatttatatttttaatttaccagagttaggctcattaagatagtgtttgctttgaaatcaatgtttctgtggaaactaattttaacttttacagatattgattacgggcttgtgaaaaggcaagtaaaggaggaatgctgtgctatctgggcattaaaacaaaacaatacaattaaaagttaaaaagaaagaaaaaggtaataacagatttgtgtggaaggagggcaaaaaaacttcacacgtggattatctgttggagaatgtgcattgcaaaaaagatgcaaaatagcaatcctccctctagcttgatggaaatgtgttttttccatgaaacatatatgtatttttacaaatgaaagatgatttaaaatggaggcatgtgtttctactctttgagttgggaagggcttggaatctttcaaattcagtacttcccagggatagttttccttttgattaaagttttgttcttatgttactttttactgttgtttttgcagtttacctaatgctaatagggtctcaggaactgtatttgatgttaaagtgtggtttttccagaagatgacagataattgatggtctccccttttcctcagcaacatagttgtacccagagggaatttatctttagaaagatatagtttgtgaggaaagaggaggatggataagtggataaaatgtaatgcagttttaggggtggatttttaagtagcccaaggggtaggaaacctgcacagaaagaagctgcgttgtgaaaatgttgaggaggaaagtgctgcatcgctacgtgatgtggaagagactgcagtgtctgggcattgttgggaatcccgggtattttaaccatgaaacatctgacaacaaattatgtgtctagatatgtttatgtgtgaatgttcatgtatcagggattcagtttcacagttttaacttcaattttcttgtttaccccacaaatgacaaaattgcgtcattccttctctttgcccctttccaacaccaccccacaattttttaaacaatcaaaagaaaaattaaaaccagcaaaccttaaattcttgtttgttatttggatggtgaaatactgcaggtagacactgaattggacattgatttccttttctctgcgtcgaaatgtcaaggaaagttgcaagtctgtgattttgtgtttggttttttgcatgttgcttctatggaaaaacaaaacaacaacagcagacctccctgcccaaagtgttaaaatgcctccttcataacctgagacttactttcattttctaggtgctggagaatctggtaaaagcaccattgtgaagcagatgaggatcctgcatgttaatgggtttaatggagagtaagtgtcaaatctgtgcaggggggcaccaagtaagaggaacagactttatactaacctttaggaagtataggtgggctttgggggctgggcagccagttttcacttaatttttcctgatttacatattagaaaatcctgggaagggctctttagggtccctcaccccccacccccttggatctttggtgcaacaaatactactgatgaaagcaccagtgtttgtgacaaacatctccctatcccaagaaaatcgtgcctggttgcaggggacgcttgacagcacttggccccgtgacagcccctctccgggccaggtccctgccacagtcttcggacatcactgcagtgtcttcaacgtggctttggccgccccctcgtccggcccacgctgatcactgcaaattcaccccaccccacctcacgcagatttcaatgtaatgaaccaacacaggatgttttaaactattagggaaacattgtttccataatattctcaccagaaacagatgtggaagtggcagcccgtgtttacagtttctcattttttttgtccccctttaaattaccattatgggtaaatcattgtttccctttaaaacaaaaaacaaatcagtacccctgcctacagaaaagaagagggaacatttatttaaaggatggaaagactgggagttaggcactcccagcctcactgaggggcatttttgcctttgagaagtcctcccaggtatcctggtatagcacaatgtggcaatccgtagtgggaatgaagattaaacaggagagactttgtattagacctgtgagacgagttaggaagccctgcctggcatggggaatgcaaacagggaacattcaataaatcggggaacttgcttttctccccaagaccccagatggggcctacccatcgttctcgtgtaacaaaacgtgtaaaaaaaaaaaaagaaaaagaaaaaacaaaacaaaaaaactaagttgaccagtctgttttcactggtatgagagcattaaccgcactagatttcaagcacctgaaggcactagtttgtaattactagctggttggcacagtcctgttccctttcttaaacttggattcgattgaaaatttaaccttgagttgcttcagcttccatttcaaaaggggagttggagtcaaggtggtagcgtttaattataccaaccaccccccaaaaaaacaaacaaaacaaacaaaaaaacctttactagtcactaagcatccaggaaacaaaggtgaactttttcacctttcagagcaaggcaggcagctccttatagagaattctagaatttgttagatcaaataattgtttagagaaggatgacatcacccatacgaatagtcctgttagttgaggatgctttttctactttaaccctgaattcagaaggattggttgggatgcacagggggcttcttcactcatctgattatgactctcaatgggttatcaacatgcacatacgtgctattgagtaagtcagcatcacttgtcaccaaccaattccgaaattaattcttgacacacccctcgataaagccctgccagcggagactgccatcctgacaataaataaataaccctgagacagacttccaaccatgaatctgtcatttgaagaaaaatcttgcataaattttccccctgcaacttgcaggagtacttacttattcatgagagtagttaagcaaaaataatttgaccatgtatcctctagataaatattttgatgaaaactggacatggctagcatttttcaaagatgcagcagccactgtttaccttagcttgagtcggatggaagctaagtcacctttgaaataaattactgacagcttcattacagattgccctaaaatttaaaaatttttatagaaaggattctcctccctaagcgagccagcctgtaacaccaggcaagggttttaaaccagaacttctcttttctgttttctttttggaaagaggaagcaacattcccagtttgccttctttgcagacaagggcacagatacgttaaatttagcctgtgagagggtttacaggggtattcctcatgggagcctagataccttatttttatctcatccaactgcctccttttttctttttcctcactgcggtattgcaacaaaagctatttccttcttaactaggaattccctatgagacagtgacatctgtccctaaagggtggtctgggtggtacagggttcttcctccctgatcttgcgttttgttagggctcggctgagctattaaatttgccttaactctctgcgggctgccatgctgattacatttttaagagtaagataatactgatttgaccttcagaaatacagaggttggatgcggattttctaactcaaaactaactctgtttcttacatttagtgccaggaacaaaacaaaaacaaaacataaacaccattaacattggttgaactaagctaatcaattaccaaactgtagaatgctgcccttcggccttcaaggaggaattcctactgtttatgaagatcgggtttgggtttttggttttttttttctttttcttttttccgtggtggtggtgggtgggcttttgttctttttgttttttctgtggtggtggtgggtgggcttttgttctttgaaattttttttgctacatcacagtccagacatagtttaatgacaatttatggggaacaattatttataaataaaaccattttataggtagtttccttccactgcaagaagtgaggtcattagttttgcaggaaatcctgggcagaaatctcccccgtttatgcctttatgccttaagttacaaccttgggaagattctgacctgggagaattaggagccttatgcgctgccatattctccaaagaattgtgagataaatcactgctttagctccctaatgcgtgtacgtttagtgaaagcacaagaaaacaattatccatccctcctgtctccgaccagagtctccagagagctctgttaatactgcagcaaaggtgtgggattcttcccccatggcctgcagtctcagtggatgttccaatttagccagaaaggcgacctaagaattgccgggaggatggatggctggcgcgcgaattgttgcttttgctcttggctgatggttgaggaatgtagagagactgtgtggggtttgtgtgacactgcggtgccttgcagattaggtgagctttcaatctctctttaaaaggggcggcgaagaggacccgcaggctgcaaggagcaacagcgatgggtaggcacattcaaaaccagaaaaaattgttaacaaaccaaacaaacatgaagatcatactgggaaactgaggccagagacccgggaagaaaataaaaatcatttaaaggaccatcagccatattggcatacatttgtgaataacacacaatttcctgacattttggagcaagtaaagtgcgtaacataaatttttttggccatgcttaaagtagaatgagatccagctgggggaaagttatagatttcagccttggatgatcagtttaggattttgagaattgatgtttttccatatggtttctgttttcccccagctctccatttgaaccagctgcttgttttaaaactatctactaaattccatctacccactggttggtctgattttaaaatttcagacctctttgaaacaaaatttgtttcctttattaaaatatgcaatgctgcaccgtctttaattttgaaaaacgccttggtaccttgcagcaggtcgttaagaatcatctcgaaaagcctctggccttttaaaaatgatcaaatttatttgaatcaaaggcactttacgttagcttggtggataaggaaattcatgatggcatcttttatttttccattcattatcaaattattttttctttgcttcctgcatccccacacccatcacacacacacacacgcacacacatgcacatgcatacacagacacgcacacacatcacacgcacacacagccacacgcgccgcgcacacacacacgcatgccaggtaaccactctagctctgctgtgtatttagcatgcagtggtggagtggctatttctcatgagaccatccagaaccattgacttagtttagggcatctcaaagaaacagcttctgtggccggggaggggaggggcaaagatattggggtctggggacaaagtaactgacacatgtttgttcatctgtttcttttagaatataatatccctagatgatggctacagtttctcatcttcccggctatgtcctatcacaatttgcatgctggaattgctcggtcttaggaacttctaataagaatactattctgttatctgaggggggaggggggatggggcccctgctacctgaccttaaacgatgattgaaaaaacgaaaaatgaactgaaatccttaattggcagaaatgtagtatgacaactatccaaaaaggcatctctataagaaatgactaattgacaatctgctgtaccaaaagttggcatttgagcaagatatgacaagtccttagtgagcaacctactgtgtactagatgtcctgctaaacccttgaaccctactaataccttggcctgcacgtctctctcactctgttctgcaagtcaatataagtattaacattcgtgataaataaaaattctctgcatgtttcagcaatccctgtatctcgcgtctgtcttctgtcttccttcctttgtctgtcttttcccaccaaagcacaaggattaaggtggagacctgaatagcttcccccaccacttagttagctgaagcggggggaggggaggagctcttaaaaactgaacgcatcccatctgctgtatacatagaagggggaggaggaggaaccaagaccctaaaagtacttccagccttagtcccaattttgtagcgaatcagaattctagctaatggcatatgttttgcctttgttgagtagtttaaagacatctaaggaattttctctgaatttcacaatcaacgttaaattcattaagcaatagtaaaagtgatgataaacccgccaacccccagtataatatctccatctacatagtaattgcttcaatggaagaattttatgttttagtattacacacccgaattagattttagatttctattttagctgttttatacttgatatactcccacacctattcacatacgtagatgaatactgaacacgttctcaaaatatccgtattttaagacgggaagttttccaattatcatactactgcttagaccaaaatatcaaactgaatgaaagaaacttgtttctggaaatactttctcttgctgtatgcagatttggatatttagtacccgaatgtatttaattttactattgtggaacctcaaaaccaaaggttaatagctttcattacctgtgaagtggagcctgcttttaatgaatgggaatagatttgccctagggggttttgggtaaattctgaattcaaaagtgaacattggggaccatcaaacacatgtccttttaatttataacatctaaataatcgatgttagactgtaataccaaggccggggattcttaatttcagaaatgagctttgattctgcacatacaaagcagacagtcgcacagagcggtcaggactcactccctttcactctaaggtggttgctttaagagtctgggggccagaatcagatttcagatttgtacacaaggcctgaagctcgctcacctccctgtcatctgtgtttctgagattctccggacctgcagcacttttacttaaatggccctgaggggattcctggcaacatctgtcccccctccccaccccagacaccccccaccactaatgagcgtggcccctctgaacttccccagctcttcacccaatgtagaagagcagtggtgcagtgacctgtgaaaggggcttcacgtaggaagggggcgagatgggatccttcagcaggtgaaggcccagaagtacacagacatttattcagaaagaataaatttgtaagtataattctttgagaaaggaaagaccaaatgatttgtggaaggcctgtcgacaggcccgcacttgaccccaccgtccgtccccgccccccacccctgctgctccactgactgccctgccctgctcgtctgctcgtctgctcttgctaattaacctcccttcgcctttcctctgccttaactgtcgtgttctagtctggagagattatatgttttaatttctactccagtctatgaattggtgaatcagccaagtgaatgcttcaaaaactgggactctcaaaagattaaaaaatatatatatacaaaccgtgaaaaagataaactctgtcccctccatctcccattggtttctgcctcggtgactccccccctcttggcctcagtttccctgtcagagaggcaggaccgtagcaccttttttccgcatgacaacgccctcacctcccagggcctaacaggtacagcaggtgtgctgtgtgtgctggttccatttttgggctatagacctgatgagatacatactccacacaagaggccttttcttgccctctaaaaacataaactcgagaaccttccctggctgtgcttctaatgaaggctagtttctgaaaaacatacagcatttggatcagtgtaatgtggtacaaaaattaacattctgttatggtccccagaagccaaagggtgtgtcctttacctgtgggaccagtgaccctgaatatagatcattccataaagaccacgcaggccatcccatgtggctgagttaaactcaaggaaaagctacaaaaccttcaacctctacttaccagagggatctgacctcccctcccccttagattataaggccttctagggggtggaatcttatttgattcctattgcacatggaccaacatgcactaacatcatgaactagaagtttcattgctgctagctgcagtgcctggagcatcgcacatacgacttttttttttttttttttttttttttttgacagagtctcactctcgccctggctggagtgcagtggtgccatctcagcttactgcaacctccgcctcccgggttcaagcaattctcctgcctcagcctccctagtagctgggattacaggtgcatgccaccatgcccagctagtttttttgtgtgtttttagtagagacggggtttcaccatgttggccagactggtctccaactcctgacctcaggcagtctgcccgcctcagcctcccaaagtgctgggattacaggtgtgagccaccgcacccgggctcctgtaatgaactattataaacaccaccacctgtgctcactggttctctcagtatgctagcaactgagttaattccaagtcaaaccatgggactgttttgttccaccccaacctcatagtgacctatcactccagcctcacccctacccagatgttgataggaccaggagaagcctttaggaagtgttagtatgtagtgtgggggcttcaaacccatgaaagattaaatgagctgcatgcaacttctggtacagtcatgattgctaaggcaatttgctaatctgccccgattgggcgtgtcctcagggcacatttgggaggttataatttgcaactatgtttattcagctacctccaatctttgcacagatccgaacccacaactccctgaagaacagaatactatgctttttagtcgggatgtctttatgaaagcagtactcctaactgacatggtgcaatatgattttcttttcttttcaatcccactgcagtgagaaggcaaccaaagtgcaggacatcaaaaacaacctgaaagaggcgattgaagtacgtgctggctccttgtgctgtctgtcttgtagcgccctcccagccagtgctgttccctgaccgctttgctaaatcattttcagaccattgtggccgccatgagcaacctggtgccccccgtggagctggccaaccccgagaaccagttcagagtggactacatcctgagtgtgatgaacgtgcctgactttgacttccctcccgtaagctacaccccgacttgtgtggccttagccccgcccacctgagcacagtgtccatataggaacatgagtgacagccctgcacatgggcaggagcatccaaaccacacttcaggcaaaactacatttcagtgatgtccatccttaggaaaaagttaatttcatgtgtaaccttaatttaataataataatcattagggctttgttcaagatggatgagcaaaattctgtcaccccttctacatcttagctcacctgtcctcacaaataaacatcactcttgaatactacaatctcactttattagattgtaaatttttatgaggaaaaaggtcctgagctatggcaggcttaattattccctcattcacatcttaggacaaaactgtatgttaaatatggcacacaaatactaattgtccatttactccactggaagtgccctaaggtaccttgggatgcctcagtgaagtgccaaatggaagacattctcattttaaacaggtgacctttttattaagagttttctaaagtccttggggcaaatgaaatcttttctcattattaaaaaaaatgaaatatatctaaatcataactcaaaaatcataaaatagaacatatggaaaagactttcctctggatgcacgacactgttggctccctaaagaactacttttagggaacaaaaaactgttcaagcccaagcatataagtttaggccccttcgtggggagaatggcttataagcggggaacgggaaacgagatggaaagatgtatgcgtttgtaagacccacagggaagagacttgtctacagctaaaacaatgagttattgttgccttttgtcaggctttcgtgggaatttgtgtttgtatattttagatggacttggctgcaaacttaaattggagaaatttagtggtatatagttagtatggatagctaaactttttaaatagcattattttgaaaaaaaagcaataaacacaatatgtataatataacccactgactttcttgaaatatgattctatatttaataggaaaaggaaacagcagcctattaaaaatgtatcagaacaataactttttattagtcctactaacatctgaacttttatgttcctacctacaagtcccccatcatcattttttttggtaagattcacattttcccaggaggaaaatttagtcccagcacatcttacaaatgaagtttcttattttcacaacattgaaccatttattggcatattctaacacatttagtgtatattcttcctaaacaattctgtgaagaaactaaattactcagtagcttaccccattccccctacacacgagaaaagaaactacccaaaaccagtaattcacaataagacccagcagctaattgcgtgaacttttgaatatgtttaacgtgttgaattaaagttctttgtgagcattaattcattaattgggctcaaaattcaaaatcacaccaagtgtcggtcacatagggaactctggtctcagggtttgaatgacagtgttgttgattagttcaagctcttgcctttctctaaactttcttgtgttcactttcaggaattctatgagcatgccaaggctctgtgggaggatgaaggagtgcgtgcctgctacgaacgctccaacgagtaccagctgattgactgtgcccagtagtaagtaaccgccacccaacccatcagcacataaaacagacaaaaacaagaaaacatgaaaacctgtgatcctgctttgaaagttacttgttgatgattcctttcttagaagccaaccagttaccccactggcagaaagttctaatctgattcaattgtttatttataaagtccttaattgcattttttttcttttagtgcagcgacattattttacataaacatttaaagcctgttagagcaaaatgatgatgagtttcatagtattcctaattagtaggaagtaattaattgaattgaccctaagcatttagggaaatagggctgtgctcacattttgaataatgtaaaaatactatattttattgctgtaattttaaaacataacaaagaggaatggtgaagacatagctacgcctcctctctccttggtagttgttgattgatctatttctgctctcaggtaagcgactctagtagctgcctagtgttactagatcctagtgactctaggtagagtttgtttttgtgttgtcttgacttttgaactctatttcatatccttatttattccttctcaccgggtcttgattcaaggatggtaagtggtcaatggattttaaatcctaaactgtacacctaagcagtacaataccgtggtggggttattttcaaataaaacaaattactacctgcgaggaggacaggttaaggcctgcagtagcaatgggaaaagcatctttctccaaagtcactcataaaggtgggctcacctggttggtgtgttggcaaatgaagaagggggaacttaaaacacagactttattgcacaactctacctgatgcccaggctgcttcccttgctgcctaacacctgacttaccattgcctcagggatcgccctctgtccctgtcacccaccatggtctctcccagaggacatcgtacccgatagctagaaagttgcctttgaaatagtttatggcttccctcatcttgcacatgatatagcaagcatgtggtggtcagggttatttaaaaaatatgtaaacattattattatttttttgaaacggagtctcactctgtcacccaggctggagtgcagtggtgcgaccttggctcactgcaacctctgcctcctgggttcaagtgattctcctgcctcagcctcccgagtagctgggactacaggtgcctgccgccacaaccagctaatttttgtatttttagtagagatggggtttcaccatattggccaggctggtctcgaactcctgaccttgtgatccacctgcctcggcctcccaaagtgctgggattacaggcatgagccaccgtgcccagccaaaaatgtaaagatatcttctgtttgttgatgctgcagaaatgcacaaagcagtctcagttaatgatattctgaagtaggagtgtcctgtgacttggggcaggggagtctagtagaggtttgatgttttagccatccttattacaagtagctgaaactcggaactgattttgctataggaagtattagctaatcagaaccaaggtgccaggctgactcaccaagggctaagattgctttacttagtagcctcaagcccaaggaactgattgtgaaaaccacctgaataaacaggagggaggaagaggtaatactgttcatctataaatcatataagcctctgttagggtctgcgcaatctatcaaccccagccctgccttcccataggaaattcctttattttcaattgccacatacatagatattccacggtttaatatacaagcaaatgtgtatattttttcaaggaacagaaaaaaacagtccatcttggctggtccctatggcccccagcccccactccttcttcaacaaagtccctgattttctcaaaagttcgaaccaaaagctggaagcgctaattatagtaacgcaaaacaaatggaaatcctggaattgtttgcattttgtattttggatccaagtcagaagttaagtacaggtacaagattaagagagtttaaccaccccagttttgaatgctgggggggcagggagacccagtttcgttaattaacagtagcttagccagattgttgaattttgtcgggtttcgttttctctctcaaatcatttagaagtttttggggtttttttaagcaacacttaattactcctgaaactttgtctgaaaacgcaccatttgtatagatcatgaaaagttttaaggaaactcagagaaaaagagaacaacgcagcttaaaacttttaaaatgtcctccctcacccgtggctcaaacagccctgcatctgccgtggccggcacgtttctggttgaactgcctttatgttaaagttcagatactggtagtgtgcccatttcttaagctgtctatttttatttgttgagctggggtttggctggctccactccagatgtctctctcacaagatttggtgctgatgatctatttatagaactgtggttctgttgccatggtaacatgctggaggccagggcggctggggagctatttctggactggtgctgtaatgtaagattgattgggcaagttagtatatcctctaagccagactaactctgaactagtaaaaaggaagaggggaacagaaaacttaggcagtttctttaaataaacttttctctctttatgattttcttttctcgttagcccgctttaaaacaattccaatctctacatgcccctccctccaaaaaataactggttttaacattaattttccatattaattaccccaatctttcaaaagtaaattttcctgtgtgtctagtcaagcaacacaaacaagatgctttttttaatgaaaagcgtaatatctggagtgttctatttcatggaccaaacagaacggaagagaactttgtgtttgtttcctgttcaggatggctagggcgagaagggcccctttgtgccaacctcttttgttctctttaatcaatgagattcttaaaaagtaaaaaggaagggatacagattctcagtaactaaaacaatctcgtgtgcccttgaggggaaagtccttgatgtttttaagaatgtcactttattgttttttaactgaatgatatagaggtatacaattttcaaactgtttgccattttaatcaagcaatttgaaaattaaaatgtttttgtcaggcattaccaaatggcacagaatgtgataggccagcctggttttggggtcctttctctactggttgatatgcataaaaccttctaaaaatcaagaatattgccagagagcaacaggaataaagaagctaagtaaagaataaaaaagaaaaatagaaaaaataaaaataaacacgaagaacaaagccccaccaccgtgctgtgctgtttgtgtggccccactgcgtcgaggccacaggctagctgctagacgcatctagagttccctgattcctaaaattatttatcttaaatcctgtttgccctaaccttcttaaggcatcagctttgagttacaaatgtaaccaacacacaagcaaatgtgccattgacttagtgctgcataactgtgggacggtcacttccgttgagcctgaccttgtagagagacacaaatagttggcaaattgatgtgagcgctgtgaacaccccacgtgtctttctttttctcccagcttcctggacaagatcgacgtgatcaagcaggctgactatgtgccgagcgatcaggtgtgcaaaacccctccccaccagaggactctgagccctctttccaaactactccagacctttgctttagattggcaattattactgtttcggttggctttggtgagatccattgacctcaattttgtttcaggacctgcttcgctgccgtgtcctgacttctggaatctttgagaccaagttccaggtggacaaagtcaacttccagtaagccaactgttacctttttatataacagagatcatggtttcttgacattcaccccagtccctctggaataaccagctgtcctcctccccaccagcatgtttgacgtgggtggccagcgcgatgaacgccgcaagtggatccagtgcttcaacggtaggatgctgtgggcttggctgttcgtaaagaacgctttgcttctgtgttgttagggatcagggtcgctgctcacgctcttggctttgctctctttggttaagatgtgactgccatcatcttcgtggtggccagcagcagctacaacatggtcatccgggaggacaaccagaccaaccgcctgcaggaggctctgaacctcttcaagagcatctggaacaacaggtttgtggagtgaccgcccaccccctgcgcttgcccaggaggccctggtctgcactgtttatagagaagaaccccgtgcaagcattccagacccctggccgaaagcgcgcttctcccaagcattcacacggcctcccttcttgtagatggctgcgcaccatctctgtgatcctgttcctcaacaagcaagatctgctcgctgagaaagtccttgctgggaaatcgaagattgaggactactttccagaatttgctcgctacactactcctgaggatggtgtgtatggcttccactcttgctggctgttcattgcggtggttctttttcaaacggtcaggctgaaaacccccatccccctcccaccaccaaaccataaaggatctataagagaagcaagaaaaacgcactcccactaattctcatatggaaaaatcagggttttgaagacttcaggagctacagagatgctagcaccccagctctgcttgaattttaaattacattaatatgtattccctttttatatagctactcccgagcccggagaggacccacgcgtgacccgggccaagtacttcattcgagatgagtttctggtgagtcgagcctgtctttagtttcctctcttgttcctcctctttttctcatggatgtaaatttacttaattccaaattcaggggttcagctacccagttccatggttttagttcacgcacatccagtgtggatttgagctctttgcgcccctctttttgcttttgttttcatatgacatcagaggctggctgacagccgtccctggtaggtgtccccatcagggatagggtggttcctggcgagggtgtcactgacaagtccccttgtttgtgcccgcagaggatcagcactgccagtggagatgggcgtcactactgctaccctcatttcacctgcgctgtggacactgagaacatccgccgtgtgttcaacgactgccgtgacatcattcagcgcatgcaccttcgtcagtacgagctgctctaagaagggaacccccaaatttaattaaagccttaagcacaattaattaaaagtgaaacgtaattgtacaagcagttaatcacccaccatagggcatgattaacaaagcaacctttcccttcccccgagtgattttgcgaaacccccttttcccttcagcttgcttagatgttccaaatttagaaagcttaaggcggcctacagaaaaaggaaaaaaggccacaaaagttccctctcactttcagtaaaaataaataaaacagcagcagcaaacaaataaaatgaaataaaagaaacaaatgaaataaatattgtgttgtgcagcattaaaaaaaatcaaaataaaaattaaatgtgagcaaagaatgatgggactcccgtgagttatttgtggttctgagcaaattcccgtcattcatggttttgacttggtccttaggtcaaaagttgggaggccccaaggtgaagtgggtataaaatctcaccactgtatgttttctggtgaccctaatctgtaggtgtcttgaaacaatttgcagacaataggaaaagtccactcctgttcctcctaaatttcaccccatagtgaaccactatgccccagtcagtcacctctgcattttgatcattgccatcctatccaaagattctaccaacaactcacaccgttacgtcatcacacagtttgcctgctgacccaggcttcccaagaaaagtagtgtatgttttgctataagataagatagggactaaattatgtggaggagaaatagaggagcacagtgtttccaatcaatggggttattcaagaaatggtgtagccatttggggaaaattgaggctggatccctacctcattgcacacaccaaaatgaatttgacataagttgatcacatacatctaaataaaagaggtactttttaaagtggctattttataattaaaaccttgggtttttaaagggcctctctgcagcataacctaagacctaaaggccataacggggttggggatgactataaaaacgaaaatcacacgtaaaatttgaatgggggaagggcctgggtcaggtagaaatttaacaaagggtttacttccctaataagcaaagagttcttatgaattaataagcaaaaccatcagaaaaatgggcacagtatataagcatgcaacttaaatacaaataataagcctctggggatatgtgggacatcactcataaatattcaccataattgggagtggggatgggggtccacactcacgggttgaagtgtggcttatttctgaggtcctgtgggttccctagactttcacccctacgcttatcccccaaggtgtagtctcatatgtggtcacttcctgggtggcttccaggaagggtgggaggaagtgatcagcatcaacgatggtgccctctgaagctggccaaatgggacttcaagttcattctgtaatccaggtcccaaatccacttcctattctagtttccagatcaaattactctcacccaaattaatcatatagtgtagctcaccagaggtgagcgatgagccccacgggggtgcagaaaagtagcaaatacctgcatctccatccaactttcacgtaacattcagtccacatgttcttgctatgcaatttttagtacaaagccctcaaaagccccccaaatataaaatccaagtaaaaatcggggcttgctatgcaaatacagctgaaagactagcccacaagttcccataatcctccaaagcaccccaaataaacacacataaaacctggacagtggctatcaagtgcaaccacaagaccagcgtgccacacaaacattcatccaggtaaaggctgtgctcagtgaaaatcaa

SEQ ID NO: 233 - DNA, 73442 bp, Homo sapiens
  source 1..73442: mol_type = genomic DNA
gaggaggagatgggagggagggaggaggagatgggagggagggagggggaaatgggagagagggaggagagagggaggaggaggggaagggaagagaaagagggaagataggtggagggagaagggaggggggcaaataggaaggggactgaggaggacacagggagaagctgggaactaacccttcctgaagatgtgctaaaggctgaggtaggcactttacatattttagtcccatcccatgttacaaatggggaaactgaggctgagaaaaactcagatattatcatatattctgtgaccgtgacagaggtgggtgtgaatgaaggccagccctcttatgtcaccaaggcatccctctaactcacagaggagtcccagtatcggtggtgccacctttcagccagctggcctggcaactatgagagcccgggacacaaaggcccttacaaccctgtgctgttttaagccacttataacctagagaagggtgcaaaggaggtagaagagcgggaagagggcagtggcaacgggatgcccacctctggctcgcctgggagaagagggacggctgccagggccccaccggtgagaggctgaccgcgcattctaaagcactggacttggcttcatgtcacagatatttcccataaatacccatcacccacacctttctgcctgaactttcttttttctggcccaggagggggctgcccaaggctctacacccctgggggcccatctgtttggccccttcaccacaattggtttggtaggtttatccccaagtcctctggaaaaaagaaaagctgattataaaatgcactcagcattattttcaatctgcaaaatacaatctatcccatggagcttacccctgagtctccacatgctgtcacatagtccaaatcaagtatctcatcagcaaatcccgacagcacccactgcgagagcgcatgctcacagcgaaggaggcttcctgcccatgcggggagtggaagcattctctggaatactttccctgggcccttaaagtggctttttggattggaaagtcacagtctactttgcacatatcctgaagatgctctccacctctccaaacatggaacctggaatgtgcttccctgggccacctttccttcctttctcgtgccttcctgcacttctgggagccggaaggcacagtgcagagacaaaaaaaaaaatggctgtgggagagagggttggggatgccaccacaaggaggccagctgcaccaggggccactgtgggacattctggagcagagctcaggaatcccatggtgccctgaccccttcagcacctggcaggagctggccagacactgggcccatttcctgagcccctgcccagactggaatctactgggactaaaaagcactctctctgggctccctggaggaaggcagaggcccttcatttttctctctctaccccagaccccagtgtacaataaaaccaccagtaactgctctgcaaatgatcaaatataattattatgtttatttgaagtgagatgatggaaaagatggcctggctgattttggaccgagtggcccatcacgatacctgaacaagcagttgtgagggtgggcctggcacacccctggatgtttacaggagcatctggtccagtcctgtcttatggctgtgcccagctccagctctggaagagtctctctgaggagcagggcctggagctgggcctgcaaagccagagctaccactagaagaagggctgggctggagcagggccaggaaaggagacctgtccaggggacaaggtgcacgcagccttcaggtgcagccagaacctgccggcagaccccaggccaccgacgaggcaggcctcaccaggaatgacacctggtgtctgaggtgaccttttattcccctaggtgcatgccatctttttaagtgagaagttttctaaagcaaagaataagcatctacatcttacaaaaaaacaaaaaaaggaaaagaagggatcctataacaaaaagcacttccttcttctagaaggaattctgagtctcaaataaagagaagatcttcttttaatatcgtttttctatgtaagaggagcagacgttattattcatgactatcaatcaatctgcatatgtaattataattgcaatgcaatacatatgaatataatttttttttttttttgagacggagtctcgctttgtcacccaggctgcagtggctcgacctcggctcactgcaagctccacctcccgggttcacgccattctcctgcctcagcctctccgagtagctgggactacaggcgcccgccaccacgcccggctaattttttgtattttttagtagagacagggtttcaccgtggtctcgaactcctgacctcgtgatccgcccgcctcggcctcccaaagtgctgggattacaagcgtgagccaccgcgcccggccatgaatataatttatatggacaagattcactttaacctaagtgtttccactaattctactaataggtttttaaataagtttactatcttgtgttcccacacagaagacttttctttgctctcagaagcatttgtttacaaacaccattggctttcccttcaattcagagaaaacgccctgtccaagtggcacagtgacatcatcatcatccatgagtcaaaccacctgtcctttttaggcatttctctgcgtcatttacagcagttcaccatagacaaaaatgttgtatctgaaaaaagacaatagaacaggaagctgaaaaagatacttttacaataaaaacacattctaaaaaaatgatttttgtctaattacatttggaattggaatttgcttctatcacagaccagtcaccagtcctcagtccataaaatcagcacttccagaggaaggttccaggcatcacagtgcacatcgagaaatatcagactttaaagtgctctgaaaatgaattgattcaaagaaataatatggaatatattaactgctgaattctactggtgacagaatgagttgaggctactataatttagaataaccttaaaaacagatacattttaaaaagtgttccaaaagaaaaatactgtacttgaaggtattctcgcagtgctgaaggctcacactagtgtatttccagaggtgacagttttaatagtcatattggagacgcttagtgacctgtgagccatgggttgctcccctaagctacactgcaataaactctaagctcctctagaagtaatatctatttacatgtgaagatttcaaattctcaggtatacatgagtgcactgtcagaagatgattaggcccagacctgtgaagacacaaacagatagtttttagacctttgtagttaacaacttataaaacttgagcttaaagagataaaattagtctattcacacacatgcatgggcatacatatatgtgtgtgtacacacacacacacacaaacatacacactccatccaaaatagggtgctcatgtgccttagaaggataacactgtactcctagcaatgcaaaggtgcttctttggacctgatcttctcctcccttagttaattgtctgtggggcatctgcagcctccttacgggcctagctactcttccagattgacaaccaaaaccatttgaacccatacagctcaccatatacattaacatgactactcacttaggacactcttacccaggaagatgaactcacagataacttttttatttgtttcaggaattttgcaaaaatccttttctctatcctaacactagactactcaacttaccctctttagaaaacacacccatgtctcaggacaatatagagcatcaaatgactatttagttttaaagggtttgttcgaaaccctcccccacccctgcatccagcaatcctaaaactattatgccacaaagttgtccaatcctaattaagtgccccccaacaaagacctgccttaaaccagaccaaaaaaacctcatgcatgcctttgtcatcctcttctgagatgccactacacctctaccaattcttgatgttccacactgaggtaagcaataaatttagctttgctctatgaatgggctactttttttttttttttttgagacagagtcttgctctgttgcccagcctggagtgcagtgggatgatcttggctcactgcaacctctgcctcctgggttcaagcgattctccagcctcagcctcccgagtagccgggactacaggtgcatgccaccacgcctggctgatttttgtatttttagtagagacagggtttcaccatgttgcccaggctggtctggaactcctgacctcaagtgatccgcctgacttggcctcccaaagtgctacaattacaggcataagccaccatgcccagcttaaacaggctattttggtagtattttgggtgagccaacactcaacaaggttatggagctctctttgagaatttaatgaaagccacgaggacaaaaggcatacaccccaaatttggcatataatttcaggggcttcatttccaagattaagctatagaaaaaccaaaaaaaaaaaaaaaaaaaaaaggaagaaaaaagtaataatttcaggggcttcacagcctcctggatttgtgacccttgtcatcacaaggtcaataatcgtaataagaaccctatactataggaggagagactggttatctgtggtttgccaaaggctagaatcacaagaatcagacttttagggtcaaaaggaactttctggatgatcaagcctaactattccctcacctacaggctgatacgcagttgtcgaatctgtgcgagaatacctgcactgatgcagcactcgctacctctccaggcaacccattccctctgtggctgtgggcagagtggaaatgagagctcggcgaggctgaccaggcccacctgagcttactctgatagccttccctctgcttcagaaggcctgtcaccagtcctctctcctctcacacacaggaaaacagaaaaccatccctcttactctgagggtatgatcccatgatccagagcagaaagcagtcccatcgggggaaactcgtagagtgctaacgcggttttcatgtccaaacaggatggagacccgggaccctttgagaacatcccagacgttgatagtgtaatcattgtatccagcaaacagcaggcgaccttgaagcagggtgagatgatagctgttaagccagttccttgcttcctgtttctcattacatgactgttactcactcattcagtaagcagtgattcaggcgcactgagtcctaggcactgtgctttgcctcaaggattcaaaggggagaaagcacagtccctgtccctgttggaggatgtggggctgaaaggaacagatcactgtagcatcccatggtaacagccataatgcaagtgctttacacacgtaaagtgctatgggaccagagaggaagggggattaaggagggcactgcagacacaagtaaattatttttagtcatttgctagttaacaacttgtaaaacttgtttaaagagagaaagttaaagtgacatttgagttggctcttgagggttgaatcggagtctgtcatgcagagaaggcagggaaaagatgttccaggcagtagcaggaacttcacgtgcagttagtctagggatgtgtctggggaaatggagtggtccaggtagccagcctgttacctctgctttaactttctatttttctttctttttttgacatgatccttctggagctatgctttttcaccagcagcttcccacaaaggagccatgagcttcaaggcactgagaagggactcattttttttttccctttgagtcagagtctcgctctgttgcccagggtggagtgcagtggcacgatctcagctcactgcaagctccattttccaggttcaagcgattctcctgcctcagcctcctgagtagctgggattacaggcatgcgccaccatgcccaaccaatttttgtatttttattagagacaaggtttcaccatgttggccaggctggttttgaactcctgacctcaagtgatcgcctgtctcggcctcccaaagtgctgggattacaggcgtgagccacagtatcccaccaagaagggactcttgcttcacctccaccttacagaaaagttccctttggggcatgaagagaagcaaaggctggggagaaaatgcctgagagcattgtggaagtgaatttctgacacttcattgccttgaaggacagcattaggtgggtacacagccttcatttccccctggagtgaagttgcctggggcaggacaaagtgggaggtcagaagctcagaggaggaaaactggtgcaaatatggatgatttcgcatactggtccacaggaagctcagttgatgaaaaggaactgagcgatgatggagcgctagtttcattctggtcctgtcttacagtcctgggaaaagtttctgaaataaaatcttaccactgagggagaagtccacgctggatgctccaaatatgatgctttctttggaatagatggcaacctccctatctgcccgcaggtcatagaggcgacactggggagcaaataaataaagaagcacttacttctggcttcagtttggtgacgtgatgaccacagagctacaggtaggtgctagtgacttgcgtagtttaaaagatgaaggaaaaacttcttagttttccctactgttatttcatcctttagtcccgactcctgttaatttctatgagtcagtaaagagtcctgattcctattaatctctatgagtcagtaaagaaacggcaaatacagcaaatttcttcaggtataaaaacaaaatgagaccccacttttttttctgataaaggacacatgttcactgtagaaaatttggaaatattcaaaaatgtaaacagaaggaaatgaaggtcaccctaaatcctagaggtatttactaattctcagctgtttccttcagtcttatttgtattttatgtgtgtatctgaatgggttggatgtttcattattgcttttattaacattaggttatacgtcctttctcatatcattaaaagagaacttcaaaaaacattatgtacatagttattgaatatatcagaatctatttagccaaaccctgttgttttggttgtgtttaatttttcttttttataaataatattatgatgactattcttatataaaaatctttacatgtgtttctggtttccttagactaggtttccttagactaggttaagaaatagaatccttagaagagttatcaggaaatagcatgaccagatcagaagtagagatgttttattgtatattttattttgaaatggaatttcgctcgtcacccaggctggagtgcaatggcgctatcttggctcactgcaacctctgcctccccagggttcaaacgattctcctgcctaagcctcctgagtagctgggattacaggtgaccgccaccacgcctggctaatttttgtatttttagtagagatggggtttcaccacattggccaggctggtcttgaactcctgacctcaggtgatccacccaccttggcctcccacagtgctgggattacaggcatgaaccaccgtgcctggccaagtagagatgttttcaagctcttgattcatatggcaaatctgccctctaggagggtggtgccaactatcctgaccccagggttgatccaggctccccatcaacccaacctctgggcatttctttgctaatcctagtggcaaaatgggcatccgatgacttaaaacttaaaacatgcaattctttgattataggtgactttgaaaatattttcaggtgtttacttgccattgtggattcactgctttgtaaatgacctgcattttaccctcttctttaattggagtgttcattttattgtttatgtaactccattcgtatctacaggatttcaacttggtctgtactgtatgtggcaagaatttttccatatatatttgttataattatattttgttataattttgttacaatatatttccatatatattttgttatgtatctttgatatacagaagttttaaattttcattatttcaaaactctcaatctattcttttgtaatttgtttagcagaaaattagaatgaaaaccattacttcataagatatttgatattttgaaggcaacaagaaaatatttttttctcttgaaaataatttggcaatcagtatcaaaagccttaaaactgggtctatttatggctcagcaagttatgtctgagaatgctaaggaaatgatgagaggtacaaaaacacttatagtagtgtttttaacagaaaaaaaaaaaaaccttgagaaaagccaaatgtccaaaaattgaagacgaatgtcacgttcataacatggaatactactcaatcactaagaaaatataatggagagaaatatttaccagcctgggaaaatgttcacattctgttaagtgaaaatgccaaattataaagcattttgtttgttaaaaagaaaaaaagacagaaaggaattcatccaactatgatttttcttgggtaaggagatcaaggtaatttaatattcccctaaattttctttattgaatactcgttacttctgtaaccagaaaaatagttattttcttaaaataagttagcagatccctctattgactaggaaaagctctcaaaaacttagaaacataccgtagcgtcatctgaccctgaagcaaaggcatctccactggggtagtacctgcagagagaaagtactttatctacggttgtgactcctgaccctggatgcccatcagaaccatgctaggcccttggaatcagaatctctatttctagggactcaaggaacatttgcagcagaagacggaagaggaagctcctatgtcaggcccactgatctctagttttcttccctgttagtgggggacagtgacactggccttgcagagtgagataatatgtgttgatatcaggcacagaacacagagtagaccccctataaatatagtttccctcaatcacatatctaattcctaagacttggcccagagctcagggataagaaagtggttatgagcacagacactgaatcagacgcacaaagccacattggatgtctgcactgaccatttactacctgcgatacttttggcaaatgacttcctcttgcccagcctcagtttcctcatctgaaaagtgagagtaataatgcatattttctgctgtgaagattacataagacagtccatgcaaagaatctggcatggtgccaattaaatcacattcaataaatgataattattactgctatagtcattgtcttctcaatgattagtgagaaatatgggccctaaattataagccagaggcagaatgagagcaaatgtctttaaacccctccgctctgcctcacccagctgtgttccccacaccttccattgtttctcctttttttttttttttttttgagactgagtctcattctgttgcccaggctggagtgcaatggcgtgaacttggctcactacaacctccacctcctaggttcaagcgattctcatgcctcagcctcccaagtagctgggattacaggtgtatgccactatgcctggctaatttttgtatttttagtagagacggggtttcaccatgttggtcaggctagtcttgaactcctgacctcaagtgatccaccttcctaggcctcccaaagtgctgggattacaggcgtgagtcaccgcacccacgctgtttctcctttctcgtaccagtgacctaccctatagttccacaaaagccgcaggaggaggagtccttttaaaacattatttattcctcctaccagcgggaggtgagagtcaaaacatttggcaaaggagagggaagcttgactttgtgtgactaacttacattggcctgaaagacggggatggagaattgaaaagctggatgacagatgttaaccattttcagctctgccccagtcagtccatcacagtgtgggcacattatatttttgaaagcattatgaattcatggagtatctgacgcatccatattccaatgtcaaaatgatttctagattaaataccatttggggccacatgggctatgatttccttctgctggtaggaagttcagggaccaagtgtattatcttccaggtaatacatagattatctggaagagaccttttgtgcccccagtgtcccctctctctgtctcctatagctatggttaaataaaagcaggattttttgaatggcactaaacccagggggtgctactggaattcagtggctaggccatagggatggtaaatgtcttacatggaacattcccttacaatgaagaaatgtccttcccaaaatgctaatactgaaccccattgagaaacactagttcgttttgttttgtttttcctgggcaggtggcagaatgaaaactatatttctagtcttcctgtagccagatgtggccatgtgatcatgttctggctaatgggatgcaggcagaagtgataagcgcaactctcctctaccaaccagctggaaagaaggcatggtggtaggccagtgggggcaggagactgagcaccatcctaggaaatgggttgcgaagacagaatgagctatcgtagcagctcagattttaaggtgagaacaaactcccatctggtttaagtcactgtgatttgggcttctctcatacaagcccatgtcctaattaattcagtgtataaccaagggcatgctaagagaataatgacaacgctcagtataacctcagccttgggtggacatggtagccagtgttcgccctggaagaaaatcaaaaggcaccctgaacatggcccactgaatcagtccctgtagcatccgtcacagaagtctcagcgtcagtttacaccattccataaaataacttaattgaaactgcattcactgtatatagaaaaatggccatttaaaattttaagttacagtgttccctatcaatcaagaattgggtttatgtctccatttatcaacatcttcttttatttctgccattaagaattcataaatactttaaaaagtttggttaccaccataacattttctctctgtctctctctctgacttcctcagtgcaggagatcgatgagtaaactggccatgcagtgtggtctccctcacacaggagggcacctaactcagccctggaaaccaggggggctttctggacagagggaagcctaagttgaaaactgatggtcaaaggaggttagaagcaaagggttcaggggagatgaaacagctcaggtgagagagtgtgcattttattttattatttttgagaaggggtctcgctctactgcccaggctggagtgcagtggcacgatctcagctcactgcaacctctgcctgctgggttcaagcgattcttgtgccttagcctcccaagtagctggtattacagtcatgtgccaccacatttggctaatttttgtatttttggtagagacggggtttcaccatgttggccaggctagtctcaaactcctgacctaaagtgatccgcccacctcggcctcccaaagtgctgggattacaggcgtgagccacggtgcccagctgagtgtgtgcattttaaagctgtacattggccctccatagccatggattccacactcatggataaaatcaactgcagattaaaaatattctaaaaaagaaaaaggaatgttgcatctgtactgaaccttttttcttgtcattattctccaaacaatacagtctaataactatttacatcgcatttacacttactagatattgtaagtaattgagagatgatttaaagtacacgggagaatgtgcataggctatatgcaaatactataccactttaattttattatttatttatttttataacttcagcataccctgagaaaatactacatcattttatgtaggattctggtatctgagggaggtcctggaaccaatctcccacagataccaaggaatgactgtactttattaatacacaggggcttatttttgtggctttatcttctatcttgcattttactaacttcaattactatctgtagtaattttcagattgatttcttttgattttctaggtaattactgcacagttacaataagtgagtctttttttcttttttccttatcccacatttgagggcaagaagtactaaagtaagcaagtattcttttttgttcttgtttttaagagaaataattctcgtgttttcccactaagtataatgaagattcttgggagttctgagtataatgaaaatactttataaactgtctcaacagtaccatctttcatacgtggcaagtcctgacctctctcttgggatctaattcatggatcctgccacttacttgacatcttgaatgtttaacaggcatctcaaacctaattagcccccaaaagaactcctaaatccatgtgcaaagcccacctcctcccgctatccctccagtcttccctgtcttagtaaatggactgctgcttgctgccctcgataaaagatgtgggttccctaagctcagggttcttctatagtgcatcccttgcatctgccagtgtcatttggcccttttcatgtctccctgtggaactagggctcaagtatgcacaaacaggctgatagcctggctactgccattgctgtgagtaataaactgtccttcatctctgacccaggagtcttgtgtcttctaccagcatccatgagctatgacagcccaacttgttaacttgtaggtagataaaatctcagatatttcataattcttgacatttctctgtctccaccatgtcttccttagttccagtcaccatcatttctttcttgaactcacacaaccacctctaactggtcatcatatttccattcttgttccctacaatgtattctccatacagccagtgatcttttttgtttgtttgggtttttttttttttttttgagacacggtcttgctctgttgcctaggctggagtgcaatggcaccatctcggctcactgtagcctcaatctcctgggttcaatcgatcctcccacttcagcctcctccacacatcaccatgccctgctaattttttttttttttttggtagagacagggttgagccatgttgcctagccttgtctcgaactcctgggctcaagcaatctgcccgcctcagcttcccaacagagcgatcttttaaaggcaaaacatgatcaggttagccacccctacccctcccaactcaaaactctccagtgaccacctggccttttgttaggtcccttaacctctcatctctgtgctcttcccccagctctttgcttgcctggctctttcatgatcctggcctcaatgtaaagatcaccttctcagtgaggctgtctttgacctctaagaaatgacccatcccatctccctgttttacttttatcatagtagttatcagtatctgaaattgtatatttgtgtttggtctagtttgtctcctgtaagagaatagagaccttgtccatcttgttcactgatatattcccagttcctagaataatatctagcatataaatacttaataaatatttattgaatgaatggatgaaaaatgctgattcaacttagggaggatattaattgctcctaatgtaattaaattaaaattctccatgagttctggagcactgttcagttccaccacaatcagcctttcttcccggggaggcctctctcagccaagtaaactgagtctggaggcggttcctgggctaaggattacccaagccaggcaatgccggcagaacagagaggtggcatgaacattctactcactgaccggacactgttgatgtcagattcatgtgtttcaaaggcctgcacgcactggccggagcgcatgtcccacaccatggctttcttgtcacatccctacaaatgaaaattagccagagttatggccactttaaggaatgtctatagacaaggcacgagtcccagttatataacacagaccatttatttcccattagcaaatggttgacaacacacttttctgagactagctttacctgagggcactttccttagtcagaaagcccttagacgcctagaactaggtcttgggatgggaggcaggagggaaggcactcggcttcctcttttagcttgttttcttcttttgcacatttctgaatggaggcaaaccctccttaccctcccccgggcatctcccttcctttcatttttccttcttttctctcttctctttatacttgcctccctaagcccagagggcaaggcaggcaggcagtggtgtgtggtgggacctctctagttgtgacattaataaatgggttggcagtgcccaaatggagcagccgagagtcccagctttgttttggtgtatggggcagccctcagcaaagctggagagccaggtgccccgggccatctgcaccctcagcagcatgctgggctgggaatctgcaaaccaggggcccataagggtgctgccatcgacgcgcagggtggcttaggcaagtcacctccctgggcgtctgcctcaacacctataaagtcaatgctctcttcaggttgctaacatgacccagaaggtcacagacatgagggtttttccattatcctatcaaggctctgggagtagtttgataagttcctgcagagtggtcatgttatcaagcttaagtagtagaatgtggactctcaatagtcaaatagcttatatgatcaaacagctaaaaagtaacagcttaaaactggtgtctaagttgttggtttcaacttggagcagagggaggtgtgtaatgaagcaccatcacacatctgaggaaggcccgctgtgggagttcagcatcccgagtgtctttactgaaaatgtgggcaaagaaaccagaaaggccttcacatctttagaggacactcaattggatgcagtttagtgctctgaaagagacaatatgatctacagtaatagcagtaattttttaaaaacacagtagagttgaggagagataaatacagtgataccaaggcacagggttgaaacatctacacatggccaaatacccaggaagaaaatcagggtccctgctaactacagctcatacagccctggcctggctcccaggatcgatatgtgggcagcctggagcaaaggtcccttatgtgtcccagctgcagaagtcacctgacagtgtgtgcgtcactgtcctgtctcaccactgcctcctgacggaggtgagacaggacccatggtaaggtcagctggcccagctctctgtccttattctcaggctggccccagaaagacttgcccctcccatttgcatacacactgcaaactcttccatctactgcttgtaccatcctggggaggggaagtgcaaataccactatgcactatggccaacttatagcggatgcgacttacagtcaggtagcaaagccctgacccaggcaccctgactcctagtctagtgcttctctgagtctctgtggccctgtctgccaattctgagctttcaaagcctctgtttcttgcaccctgtgatgggagggaggatggtggctggcaggggtagggtaggagagtgccccacaggcctcaaagtcctggtggcatcacagcgttgcctcagctcagtagccatctgacctgccatgcccttgtgcgcatctctgatgctctcagatgctaactctctgctatttacttgaggaatgacattttaaaatgtggcagatatgcaccttgagttgcagcactcatacaggagaacattccagattactctatagactgctaacatcagtggcagaacagaaggaggccctcacagcttagccctgtagctgcccaccaagcccccgagaggggcctggagccagtgcggtcactgcaggagctgggggtttagtggggagttgagaacaattcctgcagccccttctagggaagtgcctaggctaatcccatgaatggacaagaactgccaccataagcctccttagtggacacaggagccctagggaatttccactgggtctttaccccagacacgaaggtgtttccagtttctgagggggccaggtccaagcagaggacgtcagccccatgtccgtggaagctctgcagcagctgcccgctctccacgtcccacagggcacatgtgccatcgccgctcgctgtcaggatctgcccgcagaaaaggacaggaagtgggtggttgtggttattgcttatgccgggggcagtcaatcagaggcttaacgttccgcagggaaaagcagaacacacacacacacacacacacacacacacacacacacacaccctacctgctgtatctgggttcatgcacagaaatctctctcctatacaaagaaggaaagagtgcatttcctacaccctcacagtccttgagttgtgtttatatggttgtggttattgcttatgccgggggcagtcaatcagaggcttaacgttttgcagggaaaagcagaacacacacacacacacacacacacacacacacacagggaaaagcagaaaacacacacacacacacacacacacacacacacacacacacacacacacacacacacacaccctacctgctgtatctgggttcatgcacagaaatctctcttctatacaaagaaggaaagagtgcatttcctaccctcacagtccttgagttgtgtttatatgcctgcctcccagcagagctgaaatcctggcggcctcatggtggtacctacagggctctacacatgcctggctcgtaggaagtgttccgtgagtctctactgagtgtttaaaaccttcgatgcctcccactgctgtgcaggccaaaaacttaaagtgcttcttggatactgatgcatacacatcactgggctgcttgctaatagagtctggggtggggcctgagcgtctacacttctcacaggctcccagggaatgctgaggctggtcacggggcacactgggagcagcaggggtctaggcagcatcttgttggacattctctgttgctgcttttcccgagcacagtgctgcccagaggcttcccaggaccactgacgggtgccagaggatattcacgcatacacaggttcaagaaacatctgctgtgtgctgacagtgtctgccaggcactctgctaatgcatgagggtttgcagaaagattgtgtctcagtttctgttctcccagaactcagtttaataggattgccagtaagaatgaaaccaacataattccccatccctgtgttaaacaattctgggaccaggccaactttcctgttactatgttaaaccatattgagaccaagtaaaaataacttaactgcttgctgcagaaaatacctgctcctgggagaaaagactgtgaatcgattagacaacttaccaagattaacagcttgctcatccagactcaaagactgttcgcttgctgggctcaccaatccaaagctaaaacggccttgcaagacccaccttaaaatcaccaagcctggaccctgaaatcctctaagtacccttccctaattcctccattttcagaacctactaagattctgccaagtggaggttctcccttactgtggcaggtcagataaccttagctttgcttggttgcaagtatttctgatgttcgcttggggagttgacatcaccagtagacaaggatcaatgacaacagcatgagaagtgctgggatccaggtgtgcacacaggagggtcccaaacccagtgtggtgatatctgagttggtcttcaaggaagagtgagagctggccaggtgaaagaagggaaggggagagacaaactccaggggggcctatgtctgcactaaatgaaaggtgagcccgttcacaggtggggactcagtctgaagccaagagagcactctggaagcttctgggcaggagaatgagaaaagcaaacgtatgttttaggaaactctggcagaggcccaaagagcctctggatagcttacaagtacaaaggtcagccatagagtaaaggcacacaggggtgcccagggaaagacatggggacagggctggaattttactttttgtcactgccagtgtgtatgaggcctgggctctggctgagcataccttcctgggattgggagaaaggcagtgaggactcagggttcggggccctcataggcccagctggcggcatcacagagccctggagccagctgggtactgacagcaatggaggggacctgcaagggagaagctctccctgccttctggctgctccacagggcctgggtgaggtgataagaccgtggaggaagtggctcttgcagcataagtgtccacaagagagccctttgcggatgattactgatggctgaggaaagaaaagaggaatcaggccttatgcaccgctagcatgcaatgcaaccactgaccacaccacaccttcaatttccagctgctgatgggatctctcctcctcaccctttgccccctttccctttttcttcccctctctcttatatgttaggccttgaacataaagaatctcatttttttcccagcactttgggaggctgaggtgggcggatcacccaaggtcaggagttcaagaccagcctggccaacatggtaaaactccaactctactaaaaatacaaaaattagccagttgtagtggctcacgcctgttgtcccagctacttggaaggctgaggcactagaatcgcttgaacctgggaggcggaggttgcagtgagctgagatcacgccactgtactccagcctgggcaacagagtgagacttggtctcaaaaaaaaaaaaaaaaaaactcatttttttttctttttttgcagggaaggaacaaattacaaggaggggaatctgctcccgccctggtgttgcacccactggctgtccacaggaccccctccagccttgacttccctcaggaggcctgcatacatccaacaagatgacttaagctagcaaagtagcttatggacacacaaaacctgaaccgaggctgaaatttgggtactcatattttgttggatgctcaaattccctcaatctctcctggcccacacccactagtggctgttccaactcactgctttcctaataacacttgcagtaacttacagtttattttgagacaccaggtccaaacaattttctttaagcaactaccccagtcttgctctttaatttaggaaattttcataccatactgtttgatcaaagaaatgaatagtttttaaaagttaaaagtagatttctaatacttttcaattttgtgtttctgatcttcattataatataagtaaaaataaagtttaaagaccaaacatttattcatataaatgcattaaacagaacccctaactcattgtcactcatttgttctggaatgcagagaatttgtaagtttaataccatagtctcataccagccgcttgagtttctcttttatcaacctagatcccagggattgaagaaagctggaggttcatgagttcagtagtacccaaactaggccatgtatcagcatcatccatgaagctttgtgttaataataataaaattggctgggtgcagtggctcacgcctataatcccagcactttgggaggcaaaggcaagtggattgcttgagctctggagttcaagatcagccagggcaacacaccaagaccccatcactacaaaaaatacaaaaattagccaggcatggtggcgtgtgcttgcagacccactacaggcctaccagctacttgggaggctgaggcaggagaatcacttgagcctgggtggtggaggcttcagtgagcccagactgtgccactgtactccagcctgggtactagagtgagaccctgtctcaaaaaacaaacaaacaaacaaacaaataataagagttaacgcttactgatatttaccagggactacactatgtacatgaatcatctaatttaagcctcagaaaaccttatgcaggacagatttactactttactatcctcatgtgcaggtgagaaaaatgaagcacgcagaaattcaaacgctgtctaggatcaccagctagaacacagcggagccaagatccaatcctgctgtctgcctccagagccacccttgacctaccctgcctcccaggccgcgtccccgccgaggtagccagctgtgacttccctttatctccggctaagctgcttgttggaaaagaaagcactttctcacctactggtgccccctttcatccccaaccctgccccggggcaacacagagcgagtctgatgggtctccacagaggggcttcagatgcctgatggtcgtggtagccccctgagcctgccttcatccagcctaaatgtcctctgttgctttggtttgcctcaggcccaaagacatctcattttggccactgcaccagtcagtggccacagcgccccctggtgaacaagtctgcaagattcctggttaggctcaaataataggtgtaaacaacaggggcacaatggtgacactgcaagtcccaacatccctccagtcagcaattgaacaattacccagccacctgacctccctgcctctaacctccccatccctcctgacatcaattcactgaagccagagtaaactatggaaggctttaatctaactcagacacttttctcttttaaacaaaccaaaatctgactcacccctgcaagggctcccgtcacctacagggtccagcccaggcactcagggagccctgggatctggccccacccacctctcggctgcctgcctcccactgtgctccctcacactctgtggccgcctggagtggcagcggtccctcttcactggcagcagcaagtctgtgaccaacccctcctgctcggagctccccagttcccccactgtccaaccattattggttttcatgaaggtccctgagggccaagactgagcttttggccccagagccacgtggtatctggcaatatgggtagtaggtactgagaaggtttgctgaataagtgtgaataaataaacgatgcggtgctttcaccacttgctaaagaaaacttaaagtgataaaggttgtgttgttttcactgtagtgtatttaaagtagagcaaagatttaatatggtgaagcattttctttttgcattggttaaaacaggactgtaaagtgagatgcatgcagtgcacagctctgaagcccgacagctcagtgaagctttacacacgttagcacgcagaccagggcacagtaactgcctgcaccccagggggttccctgctccactcccaccctcgccaagtcaatcagaggaggattttcaatatgccatgcagttttatctcaacactaccaacaatcactagccccaaccttctcatgttattaaaataataataactaatgagaaacaataggagcttcctcttagagcaaactactggagcacagccatcttgttcagagagacgccgaaagcttcctctcctctcagctcctctttagtgctccttggcaggtcaacctgacaccgggggctgcctatttacctgcatgtcagagttggtgaagctgcaggccgacaggtagttggtgtgcatagcaacagacttctttttggcagccatgttttcatttttgtcaaacgtcaaggggtacacagaacacttattatccaaaccactaggatggaaagaaagaagtaccaaagattaatgcagagtcacagaatatgtgtctacttttccaatcacatgaacttttcaacatattctctttagcagtatcatatattgtaccctttcctccaacttttactttgaagattttcttttctttctttctttttttttttttaaatagagacagggtcttgctctgttggccaggttggtcttgaactcttggcctcgaactcgtggcctcaagcaatcctcctttggcctcccaaagtgctaggattacaggtgtaagccactgtgcctggccagtttgaagattttcaaacctactgtaaaactgaaaaaaaaaatagtatactgaacacccagatcccttcccttagattcacagacttaacattttgtcatatctacaggagcaaattctgaaccatttgactgcaaactgcagatatgacattttccttctaaacacttccacttgcaaatttacatctcctaaaaataagaacattctcctgtctatctaccacatccttatcacatttgagaaaatcaacaaaacctccataacaccatttaataagccagccatattcaatcttccctgattgtcgccaggatccagggaccaaccaaggctcacatattgcattcatttgttatgtctttttaagatcttttaacctagaacagacactacctactgtttgttgttcatgacaggaaatcttagattggctgtttatagaatgtcgcatatggtggatttgtcagatggtttcttaatggttaaagtactgtagaacattttgccaataagagtatcaaggtgctactgtgtacttctttcttattgcttcatgtcacaaggcttgtaatgtctcttccaagattggtaaagccaactttgattacttggttaaggtggaccactagatatctccagggtaaaggtaatttgtttgtaatcagtaataatctgtggtgtgatattttgagaccataaaaatatcattttctccaaccacctttcatacaaaggctttacatgattatccttgcttgaatcagatattactttaggggtgcaaaagggtgatttattttgataatgtcttccgtatttattagctggtgtttttctgtaatgaaaaatcctccttcccagtatcactgtacacccataaatttgtttttttttcttaattgtatcatgatccattattatcattactacatttgatgctcaaattaccccaaatttggggcctcttcaagccagctgtgtttttttttttaatatatgtatgacccctattggtccttgaacgttcctttactttctagaacaagaaaatatcctagcctcactttattcttttcctcccaaagacctaacctcagccttaccctaaggtgccctgctttctttttgtagggaacaatatttaaaatggggtcacttttttctgaggcactgggaaagccaagggtcccttctgcttttccagctgcttgggaggtacacaggtgtattcttgggtagtttcttatcagtaattagctttggcaaacttgtttatacaatgtgcggaggaggctgggcacggtggctcacatctgtaatcctagcactttgggaggcccaggcaggccaatcacctgaggtcaggagttcaagaccagcctggccaacatggagaaaccccatctctactaaaaatacaaaaattagctgggcaaggtggcaggtgcctgtaatcccagctacttgggaggctgaggcaggagaattgcttgaacctgggaggtggaggttgcagtgagttgagaccacaccaccgcactccagcctgggcaacagagtgagattctttgactaaaaaaaagagaaaaaaaaaaaacagaatgtgtagagaatgatttgcacttaggctatggtaaggggacaagcatgctgtggactatggtcctccctgacccctgagctgggatacatcctccccatcctgagtaatttctctgttgagatacttattacttagggttattcgcattgctatgagaagcaggaaggttttgcagggtgatgcatccagtgtcgaatctctgctttagtacctaactaatgttgtgatcttggttacgtattcatctttgaattccagtatgacacctggcccagtgccttgcacacatgagatcatagtaagtgtacaatacctgaatgaaagcttcttggggatatggctcctaaataagaaatacttgtatatataaccaattgacacatttttgggggaaaggggattgtggcaataccatttgggttttagctttcaagtttggaaacaactgagagggagacccaggagccaggtaaattgagataaaaaatatccccattattacctacaatgacttttagagaatgtggcatcggtgtgggtctattacagataacagagtcacagggatgtcacacagtcatggttgggaaacattatgtcagacttaccactagaaactcaaatgaatcacagctgctcttagcagttttgggaaaggtctgggaaggggagatggtacttttacctgcgataaggagtcagtattagtttcgtctttgacgctctctcatccactagaccgccacattttgaaaaatgccttcacaaatgttcatgccttgaacttcctctgtttggccctcgtaacagccagtgaggcagccaggaaaggtgctagcacctcccacatgccagggtggggaaacagagatgacaaagatcagggcgccagccatccctccactctgaattctgttctgcaccacgctgagtcaccagaaagctatctatccgggcctggtaaggctgctctcttccttccgtcccgctacccccatgggaattcttccgctgcattccatttagtgagggtaaaattaagaaacagccacagcatcatttcctaaactactgttgaagacattgttcactgttatcatattcactacacattgcagaagggcctacccaatatattctttctgtaatttagaactgcatatctaatatttcaatattggatattgacagattatgtaacacatccagctctatgcatctgctaaaattcatgtccaactagaaacatattaccctaggatataaaaaaatgtggagaacttacgattcctactgagtagtgaagaactgacactgcagcagaggtctggcttttgccctcagctacttggaagtgatctctgggcccctggaatgtcctgcctggtaagagtggcttggtttgcttgggggctctggccaccagtttaataatgtgatttatgatgggggcttttggatgcatcatatcaggtctgatctccagaggaacttgagactaaaggtatctgcccgaacttctagagactgaagactttataaaggtaaaccacacaggcagtgtgtggtcaagcccccaataaaacctctggacacctaaggctcagaggagcttccccagctggcaatactctgcatgtattaccatacaccgtggccaagaggaaacaacgccgtcagtgaccacaccagggagacgatgactcgcagctccatgtctggatgcctcctggcttctgccccaggggtctcctcctttggttggttctaatttgtacccttacactgtaataaaactgtggtagtaagtacagcactttcatgagtttggcgagttgttttagtgaattcctggggttgtggggaccctcaaatttgcagccagtatctgaagcaaggggcagtcttggaactgtgccttctaactggagttggctaaactcctttgcaccaaccttataattgtggcctatttctctcttgcttgctttctctaatagatgtgttacacatgtagtacaaatatatatatatttacatatatatcttttattatagcacctcttatccttttaggaagtagatggtaataaattttatataaatactggcatccatctataaagtggagacacaatccacttttgagctattttaaaaattaaaaaatatgggccgggtgcagtggctcacacctgcaatctcaacactttgggaggctgaggcaggcagatcacttgatgtcaggagttcgagaccaccctggccaacatggtaaaaccccatctctgcaaaaaaaaaaatacaaaaattagccagacgtggtggtgcacgcctgtagtcccagctacttgggaggctgaggcagaagaattgcttgaacccagggagcggaggttgcagagagccgagatcatgccactgcactccagcctgggtgacagagccagactccatctcaaaaaataaaaagagtgaaatacatgtatgtgaacatgggctccaaagggacaagtggtcttggccactggaaggagagtgagactatgtccccaaagcagccaccctaagggaagggacactggagaagatggttggtgtgactggctggagagggctccaaagcatttgcctggggactcgggcttttcctctttaaaataaaattctttcttcctgattataagaagaaaaatccccatagtcccatcatccagaaagaactactattttatttggtatagttcctcccagcctttataatatgactttttttttttttttttttttgagatggagtctcgctctctcccccaggctggagtgcagtggcgcgatcttggctcactgcaagctccgcctcctgggttcacgccattctcctgcctcagcctcccgagtagctgggactacaggcacccgccaccgtgcccggctaatttttttttatttttagtagagacggggtttcaccatgttagccagaatggtctcgatctcctgacctcgtgatctgccagtctcagcctcccaaagtgctgggattacaggcgtgagccaccacttgcccggcctaatatgcctctttttaaaaacatggctgagatactgtggcagaaatattttgaatggtctcagagttgttcaacacagggactgggaattatgtcggtttcagttctcattgttaaccctgttaaactgagctccaggagaatagggaataaggcacactcttcctagtaatcttgatgcccttttcacacagtgtaattgagaattttcctttttaatggctgtatgatattccattcaattcgtgtaccacaattcacttaagttttcttggatgggtatgttggttcctttttcctttccttttctgctttattttatttttgagacagggtcttactctcacccaggctggactgcagtggcatgatcacagcttactgtagccttaatctcccaggctcaagcagtcctcccacctcagcttccagaatagctgggtctacagttgtataccaccacacccagctaattagattttttttttttttttttttttctgtagagacaaggtattattatcacattgcccaagctggtctcgaactcctgggctcaagtgatcctcctgcctctgcctcccaaagtactgggattacaggcaagagtcaccacgcctggtactttttgcttcatttttaaaaatactacaattaatgtcattgtccatatggcttttctatgttttggatcattcctttcaaatgagttcctggatgtggagtcaccagatcaaaggctatccatttttcaaggcttctgacagacattaccaagttgctttccaaaatgtttgcaacgtttatggttctgccaaaagcatttgagagagcaggagataggtttgaaatgtaactactgtcagtttgtaatgaaaataattatgaaagagagttttatggttttgttttttttttttttttttaaagagatggggtcttgctatgttgccagggtggacttgaactcctgggctcaagtgatcctcccacctcagcctcccaggtggctgggattacaagcaggcaccactgtgctggcttatggtttcttctttgatcaagttcagggaaggatttagcatactgctaaacaattaaacaacaaaaactgtgagttcttgtttgtttgtttttgccaagagaacagtattctatggttaacacaaattctgaaaagctgctgtagctccaacttacccacaagcaatggcacatcccgatggggcataagcacatgccatcacccacgtgcagggcatggtgaccgcgtgctcctgaaacacagcacagagtgaacaactagcacttccacacaaaaatcttttttttttttctttttttttgagatggagtctcactctgttgcccaggctggagtgcagtggcacaatctcagctcactccaacatctgcctccggggttcaagcaattctcctatctcagcttcctaactgggattacaggcatgcgccaccatgccaggctaatttttgtatttttagtaaagatggggtttcgccatgttggccaggctggtctcgaactcctgacttcaagtgatctgctcaccgtggcctcccaaagtgctgggattacgggtgtgagcccccatgcccagccacaaaaatcttaatgtttaaattttagaaaataaaatcaccagatgcctactgaattacattatagtttcaaaaggaagtggtacggggtaaagatgggctcaagacttatgaggggactcttataatcaacttgatgtcacatattcgaaaagttaaaaagctcaactagcaaaagcaaaaaaaaaaaaacctttcatgttttacttcctccttaatgtcatactccctttgttcctctgcctatcagggccccttttctttggaaggtatgcccaaatctcctttcagatatatacttttccttatttactctgatttccattttcaaaatatactctggaatgactttttatatttgtattttaagtctgtttacttgtgaatctgcaagagcctgtgtccactatgagccctaaaccatcccagggaaggtatgaatgggtcaggggaggggagggtgatcttgggttgtgctcacggataatgagaactggtaaaatggaaacattaagaactaagcacaacagtccctggcttctggcttcacagaggaagaatgagaaccaccgtggcacacatggctggcctgtgtgcggttgcacatcttggtggtggtagaaccaggaccagggtccacgtctcccatgggaataaaacctcaggctcagatgtgttggaaacatggctctgttgtttgcatatctgcatgcaggaggataggggtgactcagccagccagcagccagggatgggcgcacttagttcttaatgcttccaatgtacattcaagtgctggtcttcttttctgttataattacatgtgtttttgtggggaaacacaggccccaatactgtctgcccaaatactattgtcgatagcagcctggtaggctttcagaggccaagaataatctactgctctccagagaacgagctgaggtagccactctcagcacagggtatcccaggcccctttcctcacaagtaatggctatattccctgccacgggccacaagtggcaccctcggctccccagaaatcagtctgtgctctatgccaggataaggtggaaacagaagcaactacacccctgcatagtccagaaggtgctgagagagatgaaggcttccaaggagctaggcgctgtatagcaaagccctgtgcagattgctgtcatttttattcctcaggggactgaccattagggactcgactctacaaaatggtttcggcccctcacttgaccaggtcatgtaccggctgcttcccatgacactgactaaacacattcaacaatgcagaatatggctgctgttcactatgagacagagacaggtctcatgtttttcatagcataaaggaaggctttctaaataaatataggaattcttatttaatacacaatactctttattgtaaatgccaatgcaatgcaggtgttccagcatacctgcacataggttttggtcttattttcattaagagctaaaatttaaatctaagttgagctgtgcatgcccaagccagacttgcaaggggatcagactgcatcacagggtagctctgcccagtcccactgcagcctcatcttccccaccctccacgtgttcattcccacagggctatggagtctggtcaaagagaggggagagagaatggagaattttggtgcctcttatcactcagaagacaaatagtacatgcagttgcacatgtggttgcaagttttccatgctttgcccatttccatgttggtattggcagcccctatggtggctctaattgtcctcttggggcgagaggggaataaatgctgcaatgggctggctgagctgttcaaacacggataggccttcttggggtttccatccgtagaggcaactgcttgcagggatacatggagagaaatcaggacagggccgggcagctggaccagagcacctttaagtaggctgggattctgaagcctctataacgtggctgggaacaatgcctcaccttgtttgtggtgaaggaatcccacacgatcaccttcccatcctggagggagaagagcaaacagtttaggggttgtcaagttcttacagattactgctgagaattcctcataaaagctgtgtccagcagggcagtgtgaagtagaaagccagaatgaggatctggataatcaagaccccctaatctatccatgaaaaaaagtggggtgagtgcaggaggggctggatgttccagcagagccaaaggatcagttctcaaccttacattccttggaaagatacaactacaggaaacaacacgcagacacttctttcataccatttgcaaaccacgcacaaattgttggtacactatcgtcacctgccataccctaaatgtcaacaaattatacaggggaaagataaagctgacattacctttaggcacctgacaggtaaataataaatctttttctcccacaacatctccactgctttgtcctttccccgatttgctttggagtccatggtccctgcggcaccatccaggaacccccctccccattctctgtccatttctctgccagggacagctgcggagggggctgtatgggcctgagatcagtctaattcctccaggtgctcacagatgtcacagctccagctctgacatttcacacctacactgagaacaacatgcgatatgcacccatcgtggtgggaacccctgtgggcagccaatcagtaagcaaacagcactccctgccagggtgaacgcagagctggccctgccacagagaatgctgccactttcactgtaacccagctgtggcctcccatgggtgtgggttgtgactacagcatcatctatttgtaatgaaaacccattagaggtaaatccatgtgagccctggtccctgcaaagcagtcctctgcccagaccatggcatgcaggttgctgggcaggcagtggaagaggatcagatcctcagggatcggaaatctacagcctctatggcaggctcaattttttaatcactcaagccatctggggccaaactttggtgaatgaggtggcagagatatggatggaaaacatcacttaagggcagaagcaagatcggatctgcagtgacatagctgcttgctttgcatgagctgacggaacatttctgtgttaatgccatgcatggcagatggaccctgaagcaaggtcaaatttggtggtttgggggccttctgagattccaaagcacattggttcttctggtctaattctgcctaaatggccacacacagtgtgtggggtggattcagtaagcctttagcgcagaaactggagtggggccacacacctgtatcgtggggtcctccacacctggagcccctgatggctggggactggttcctagcattgcccacatcagcgaccacgttaggggcttcttccacctcactgcctgcctgtcccccatgtgtgctctggagtccctgtgtgtgccacccactgtgtgctctggcgtctcattaaactaagtgtggtctcctcggtgagcacagatttatgtgcaggggcctacgtacccagagagaatgtgcctctatccccaagccttaatcccacatggctggggtgactactctcctgcatctaagcaggaaggctgttgatgagtccaagtctgttccagaggcttcctgctttccagcctcctccccacacccacatccacctcttcctgctctggagcagagagggatggacagtgtgtgcccagccctgctgaaggtcctccctcccaacagcagtatgtgagtgacagaaaacccaacacaaagcctaccttgtctggatttaagaagtcaaaaggctagagagcgacatggatatcctgataagcaccttataagaataagctcttgaaaaagactagaaagaagtgctctaaaataataataatgggcagggcaaggtggctcacatctataatctcagtgctttcagaggctgaggcaggaggatcactcgagcccaggaagtcaaggctgaagtgagctgcactccagcctgggtaacagagtgagaccccatctcaagaaaagaaaaaagaaaaagaaaaaaataataatggttgtgacaggatggtgggagtaaaaggtttttatttgtttgtttctttaatgtggtagaatacataagtgataaatttattttgatcttaaaaaaaaagcaagtgcaatgtgacatactagatttgtaggtaatctaggagagtaataacatttgtcctatcaaacgcaaaactgacacagacgttacagtttgtggattatctagagtatatccagtttcacaagggttataaaaaaaagcaaaccaacctgcttttggaaaaactgagcacaaggcaggggttgggagaaacctatgctgatcataaaaataggatttatataatatctttttttttttggagaaaaaaaaacagtctcgccctgttgcctaggctggagtgcagtggcatggtctcagctcactgcaacctccgcctcctaggttcaagcgattctcctgcctcagccttccgagtagctgggattacaggctcccaccaccatgcccagctaatttttgtattttttagtagacacgaggtttcaccatgttggccaggttagtcttgaactcctgacctcaggtgatccatccgcctcggcctcccaaagtgctgggattacaggcgtgagccaccatgcctggctgaatatctctctttttttttttttgagacagggtctcactgtgttgcccaggctggagtgcaatggcataatctcagctcactgcagccttgacctcctacacccaaacgatactcccacctcagcgtcccaagtagctggcactacaggcacgcaccaccatgcccagctgattctgtatttctatttttataaagacgaggtctcaccatttggtctcgaactcctggattcaagtgatcctcctgccttggcctcccaaagtgctaggattataggcatgagccactataaccagcctgtagaatatgtcatgtgacttcagtttatagctttatgttcaatacatgttacataaaaatagacatcaaaagtactaagctgtgggagccagactccaagtgagtcccaaatcattccagcctcttgatagtcacacttttctatagtctctttcctctgtgtatcagggttgttctgtgtgaccaacagaatacaacaggagcaatggactgtcacctctgaggccaggtcatgaaatatggcatggccctgcctctgccccttcttgtggatcactcgctctgggagaggccagctaccatgttgtgagcaggtccaatggtgaggaactgaggcctccagccaagagccacgtgaacagggcaccctggaagtgagtctccaccttagtccagctgtcggcaaccacagccccgaccaacatcttcacacaacctcacaaaccacctgagcccgaaccacccaatggagccactcccagatgcctgactctcagaaaccatgcgagataattaagctgctaaatttgggggtaattttttggaggaatagataactaataaataatatataaaataaactgtaaatgatatgatttttaaaattgtattttacaagatctgtatcttaacattgttctttatgacataagaattgctaagctccttaaattgaaagaaagtcattgacagaatcttacgccctcaatttggaaaaaaaagaaactatttaaaaactggtttcatttacaaataagactttgaaattattttcaatggttcatcatattggttacatatagtctactgtttcaactattaccaactttaaatctacccaaattatgaagttctataatatgtaagagagttctttatgctaaatcacatcctttggagaatgagcaaagtcacaaagatcagaaaagggcttttggaaagggacagctctcctcccccttagctataaaatccaaaacccgctcacctgttatgcagcaggtgtgacatacctgtgacgagctcacgatcctcctcttatctttgcaccagtccatgcacaggactttgttcccgtggcctttgagggtccttctggtcttcatgacaaactgccccagggcctccacccgctccgccacctggtgcactggaatgacaaggccatagtcagtccccttgctaaggaccaggttctgggctttgggctgacacagcacagacatatgttccgcagagggaggcggccccatgggcttcctccataacaagccacagcttgattctctgattccttaccattgcatcctagcagcactccttcttttaagatcagtagagggtagagacaatactgccattctctctttgtgtttaagaccctacatttttcaaagcagttttatctatgcatgttgagggattaacaacaagaccacctcatattcataaagcactacataaaattattccctttaagggccacagctctaagaggagggcaggatgggcaggagagtgagaccgctatgcccatttagcagatggggaaactgagactcagagaggttatctggttaagacaagttcatacaatcaacagtgaaccaggctggggcttctagttctcctgcctaccactctctcatcacaacgaaaactgactttacaaaactgttccaacaggactataaggtacaccctgcagctctagagcttgccgtgtctagctgaccctgtgtgcctagcactggcctggacatggcaggttcctcatacacatggcgcaggaaagaatgaaccagcaaactgccaagcaagctgtctgcaaactgcacacctgtgagtttactgaaaaacctagtgtccacagaaatcaatgcaatgtcctaaaagtctgaatatatgatccactcacagcaccacctacaccagaaaggagatccaaaagtcaatctctcagggctgggaccacagcttctttcctgaggccaagggcaggctttctaggggcttgcagagaagctgagactgatgagtctgagagggacaagtttgtaggaagtggctggaaagccacaaagaccagctggtccaggcccttcatcatgcaggggaggacgccaaggtctgcagggatcccatggccactctccacttccctctcttgttggtagctatgtgagaaggagaagccagggctctgaactgtccatctacatctccttccttgaaacctcccagctggcctttctccaggtaggtgaggagggaagagggcattttcagggggaaacagcctacgcaaacagacagaggaacagggtgggaagaggcaaggcagctgcccctcatgtcttcccagggagctgctgaggcttgacggggccgtggcccatttcccttcaaatggaagcctgtgccgagaggtgccaactctgtggtctgagtcctatgacagcagcgtcccttcctgggaaatccttcctcccatccttccctccccaaaatgcttcagtgtgtatgtcctaaaaacaatgaactctcttaaataaccaaagtgtaatcatcaaaattagaaaattaatgctgaaacaacactaatctacagacttattgagatactgcctattgtccaaataataaccttcatagcaaaagaaaatccacgatcatagattgcattcagttgcatgtttagcctccagttatatttagcctccagttatatttagcctccagttatgtggctgcttcttgtaatgtggtttaatgcttccttgagattagcttgggtaaaacacatttggcagggacacagagatggggtgctgagttaatgtcactgcatcccacctgggcacatgagtcccactgctggtggggtcaccggggatcatctggttaaggggacacctgccaggtctctccactggagagttaccattttatcttttgtaatgaaaagtgtcttgttagggaggtactctgaggctatgtaaacatgttacccctcaaacctcaacggccttattttaattccactaatgattctggcctgaatgagtgattgtgatgatggctggcaagtggtgatctttctcactccatccttccctctgcattcattagtcagctttctaaggaggagttctgcctcctctcccagttatttatttattcattcatttacattagtagagactcatgggttcttactttattcaagaggttgtaatccattactaatactattgactttgatcttcaaattgtcccaggtgatggggagccccgtcaagcaggttcccatgaccttctgacatgtccccctcatagtctgagcacttctcattccaagcttccgttgttccttccctgtccttgctctaaaatcagctgtttctccatggaactaaaagttccttttagttgcctcatttccttgtgataaaagagcaaagttgcacatgggctaaaagtctttgtgaaaactcaaactgtaaaaatacttgctaaactaggccaggcacagtggctcacgcctgtaatcccagcactttgggaggccaaggtaggtggactgcttgagctcaggagtctgagatcagcctgggcaacatggtgaaaccgtctctaccaaaaatacaaaaacttggctggatgtggtggcacatatctgtggtcccagttacttgggaggccgaggtgggagaactgcttgagcccgggggcaaaggtcgcagtgggcagaggtcgcagtgagctgagattgcgccactgcactccagcctgggtgacagagctagatcttgtctaaaaatacaaacaaacaaaacaaaaaccttgctaaactctaaagtgctacatgaatgttcaattattatgccattgcttctgctaaaacattgcattatttactgccacaaacagcatattcgtcttttacaaatacgttctttacaaaatacatcgaatgaagtttaaaaatagattgaattttccaaattcttttttttttttttttgagacggagtctcgctcggtcgcccaggctggagtgcagtggcgggatctcggctcactgcaagctctgcctcccgggttcacgccattctcctgcctcagcctcccaagtagctaggactacaggcgcccgccaccactcctggctaattttttgtatttttagtagagatggggtttcaccaagttagaccaggatggtctcaatcttctgaccttgtgatccgccagcctcggcctcccaaagtgctgggattacaggcgtgagccacggcacccggcctgattcttataggccttttttttttttttgagtcggagtctcactctgtcacccaggctggagtgcagtggtgccatcttggctcactgcaacctctacctcccgggttcaagtgattctcctgcctcagcctccagagtagttgggattacaggcatgtacaaccatgcccagctaatttttgtatttttagtaaagacaggtttcaccatgttggccaggatggtctcgatcatctgacctcgtgatcaacccacctccacctcccaaagtgctgggattacaggagtgagccaccgcgcccagccatataggccttttatataaggctctatcggcccagagttgtgagcatattgtatttagtattttacttagaaattttacatcaatattattgctgcttcccccaattcagcattaggatagccatagctttttgataatttcccttttaataaaaaagatgattcacccaaccaaaatagggccctccttacataatgtgaatttgaatagatcccaactattaattattttttctcactacattttttcttcccacatgtagatcactgccaacccactccatcctgtttctatctgccaaattttgcatccactgaattaaaacaaattttaaaaattaaacattaggaagttaaaaaaaaaaagacctggaaatgagctgaatatgtgctgggtattatttgtgtgaacttggttcaggacacatgtagtttcccctttgccttctggaggaccattcctccaggatttaatttttttttttaatggtgaatataaccagctggtttctataataagaatttgctagaatataatggtaacctgttaagaaattccactagctctaggaagacaggagtgctgtcttgtttgatcttcttcagaggcaaaactggagcaaagcagttaaaaatccaggctctggatttgggggcttgggtcaaagcctggctctgtcgcacaccagctgcacaacctcgagcaaatcatgtactttctcgccacctctcttcccctgtggggttgcggggacaactattcaagcctggcataaagggaacacttcataagggttggctatgacattctccagcatggcgtacagtgagtacccagtaatatttactgaaggaataaatgaaatgcttagtattgattaaacttcaatcaacggtagcaatcctaagcagcagtctttggtgggcgaacaaaacaatgcctctttgccttctttttctgtacctctccctatccctaatccatcatccctacttcagctgtcaagcaactcaccaatttaacagggcacgctcactagcactgggagtgggaggcacacacagggtttcagacctactttctgatccaaggagctcaccaacctttttttttttttaaagttccttttttttcttttccccctcctggccctatcctgttccctgagcaacttggatttggtctttaccacgcacaaacccttacgccattcagatacagctcaaactctttcctagttcattccagttcagtctgtgccagcctctgggaccatccaggtatatgagagtcagtccctgacctcactgtagttcagagtcaagggaagagatggagccataatgatgatttccatacaacgtgggacttgctaagctagatgtgtggacacaagaagcttctgtcccagagggtggggcactgcactgggtcttttggggtggtatctgagctcagtcgaaaggataaaaaggtgagtcagatgagaggaggtcctaggtgggtacgctaagctgaggaaatggcaaaagcaaaggcccaacaataatactgatgtaaaatttttacatcaatattttttaggggtggaataaacaacctgattgcagagtaaggggtaggtgcaggcaagtaatggcgctgtacacccatgacagagctcatttatcccaccgtgacagcagcctgctgtcatcagaagagtggcatggtcggatctgccttctcatgactatctgtggctgcagcgttggaggacagcgtcgatggagacaacactggaggagggaaaccagggaagagactcctcttctttggcagccccctctccagcggacacaccatctgccgcaccacgcttctttgtggtccctccaaggtcagactggaacagcctagaaactgctccctgtccctggatgttctccttcccatgtccagggagaggacgcttgcctctgtggcctccctgctcagttgggtcctctgaagcttgagatgctgaatattctggatgccagtccagaccaaggaatcagaatcaaagtcatggctggaactcaagaggaagtgtaggccagtgaatgtttgctgcttgaatgatggttccagaatctctactatgtgccaagagctgtgccagatgcttgggtacagaaaagagtaagacagtctctgctcttactgagctcacagtctggagggggcagacaggtcagcacccaggtaacaactacagtgcagtgcgatggtggctgacagaggctgtcacccagggtcagggagccagaggggaacagggttgactccgctggcaggcgtggtcattagaggtgatgtcactgaagcctggtttgaaggatgcataggagttggggtggaaaagggtaggtgggaaattagcttcttttttttttttttgagatggagtctcactctgttgcctaggctggagtgcaatggtgtgatcttggctcactgtaacctctgcctcctgggttcaagcgattctcctgtctcagcctcctgagtagctggaattccaggcccatgccaccacacctggctaatttttgtatttttagtagagatggggttgcaccatgttggccaggccggtctcgaactcctgacctcaggagatccacccgcctctgcctcccaaagtgttgggattacaggcatgagccactgcgcctggccaggaaattagcttcttaatgtctactttagtcgctgttttttaggaaaatggcagacaatgacccaatccatgggagtgttgtgaggttcaactgagaaggcaaattaaagtgcctaacaggcagctggcaggccaggagtggcaaatctagagttggtgtactaggagctgcgaactagaagactggaaacaacatgacccggagagcaacggggcttttgaaatggaggagccatgaaaactagagatcatgtttagaatagcagagaaggggtgaatgaaaagaggggttgtgaatggagagatggttttgtcttgattgccttttatagaattatagaagtaaatgcatattcattaaaaataatcataaaataaaaatatatggtcacttacaattctgcttagcctgaccattcttatcatttggtgtgtacccttccagcctttcctccacatatgtgcacacacatatatatgtgtataagcagacaacatgccacataaaatttgggggactacaggcatgggattacaggtgtgagctgccacacccagcctatcatttttaatgactccataacattccactgtatatacatactataatctctgaatctcctactggtggacacttactttgtcccagggctaccatgatacccttgtactgtattatctccttagataaatttcaattcgtggaattactgagtcaaagggaaagcatattttttaaggcttttgatgtatgttaccaatatccaccattgattgtgtgtctcctgggtgacgggcactgggctgagtgctttacacaacagcctgaggacaaaggctttatctccatttctacagatgaggagcctggagctcagagaggctaaggacctcatgcacacatacttggatccctaagaacatttacataccttcaataatgggagaatctgtgggcgggtagctatcattatttagaaaatcaaggagtaggtgaggcactgacaatggcttcttagtccaggagacatcctaactttggatcctccatgcctctttctttttttgagacagagtctcgctctgttgcccaggctggagtgcagtggcgtgatcttggctcactgcaacctccaccttccaggttcaagcaattctcatgcctcagcctctcaagcagctgggattacaggcacgcgctaccacgcccggctaattttcgtattttttttagtagagatggggttccaccatgttgcccaggttggtctcgaagtcctggcctcaagtggtccacccacctcagcctcccaaagggctgggattacaggtgtgagccaccgtgcccagccatacctcttcgaggtagccagatcaatgggtcacagagctagagagcctagatcaggagtgaagaaacctgcctgggtcttggcttggcagccacttggctggaagaatcatggaaagttacagccagaagagacctgaatgactcaacaagcaaggactgagcacctttcgcaggctggccctgtgctgcgtgccagactgaacatgatggacgggtcccaactggatggcacttagagttggataaccatgtggaccggtagtcttcaagctcccattttacctgtagaagtctcccccaactgcctctgctttggctcatggacaaaatcttaccagaagtccaatacggaaaacagatgaaggcagagctgagctggtgaacagtggagggagggtgacggccagacaggaaggcacgtctacccctaagttccaaatatcacatctacccctggagtccaaacagcaagcgtgaaggccagtgagccacatcaagcccccttgcttctcagaaaaggaaaatggggcctgagggaagagcacagttaacaaattaaaggtgaatgcatatctcctcggagcctgcaccctgctctgtaaaatgagggtattagagagtatctcacagggccttggaaatataattctggcaaaaacttaacttttcatcacgatgtggcttactctcaactttcagggaatacttttgttatttattttataatctgtgcatacatgaactgaaagcaaaagatatggtgtgcagctcaatacacaagaattcaaaccatgtaaatttataaagtgaaaattcacaacagggtccttctcattacatcatcaggcaatgaaaaaacaaggaaccaaagcatgaacaagctctaaaatatccgtgaaaataaatactctgaaaccgactgcaaagaagacaagcgaaatgtcttaaatagcaaaacaaaactatttaaaaaatgatctggaatcactttcaaatttgcactaatatatacagtcttttcatggccaccttttggtagattaaaggaatcaaggagaaaaaaaatttaatgctaattaaaaaaactcatgtagtctgattctgtgccaaagtagaatgggataggatggatacaaaaccctcaaacaggctgatccgagtgcaatggtgtttactactaattgattacaaccagttacagatttctttgtttcttctccactcccactgcttcacttgactagccttaaaaaacaaaacaaacaaacaaaaaaaccccacacaaggcgggccaagatggctggttagaagcagctgcaatccgcagcgctcgtggagaacggaatggcgagtgaattctacaccttcaactgaggtattcagattcttgcactgggactgaatagctagtcggggcgactcacagagagcgaggaaaagcagggtggggagatggcccacccggggggcaacactgagccaggggagccccgaccaccggccaagggaggcggtgagtgattgtgagaccacgcccgggaaaccacgcttttcccacagatctttgcaacctgtggatcgggagatcacctcgtgagcccaagacgccgagggccttgggtctaaagcacagagctctgcagactctcagtggcagcgtggccacacacggagacccaggagttttcgcaaactccggcccaagaaagtcctgtgaggaaggagatccatctattcccctaggaaggtggggtgatgccagggagctaagcaccgtcgttcagcgggccccactcccacagcacctcacaagctaagactcactgtcttgtaattccagccagccagtggtagacgttggagacggcctgagacgaccgagctgggtggacgtgtaggagggacagacactatctctgcagctcaagtaggccatcctggcctgccagctcctgggagtcagggtggtccaaactgggaggaattccccacagcgcagcacagctgctgtggcagatcatggccagactgctactttcagtgggacctggatgctctggagagtctgggtggtctggatgagggaggtttcccccagcacagcgtatctgctccaccagggggcagccagactgcttctttaagcgggtccctgatcccattcctcttgactgggtgagacctcccaacaggggtctacaaatgcctcctccaggagcgttccagctggcatcaggttggtgcccctctgggatggagtctccagaggaaggagctggatgccatctttgctgttttgcagccttcactggtgatacctccaggtgcaggagggacccaggcaataagggtctggagtggacccccagcaaaccgcagcagccctgtggaggagaggcctgactgttaaaagaaaaacagccgggcacggtggctcacacctataattccagcactttgggaggccgaggcaagaggatcacgaggtcaggagttcaagaccagcctgaccaacatagtgagatacaaatatacaaaatactaaaaatacaaaaattagctgggtgtgatggcgggcgcctgtaatcccagctactcggggggctgaggcaggagaatcgcttgaacctgggaggcagaggttgcagtgagccgagatggtgccattgcactccagcctgggagacaacagcaagactctgtcttaaaaaaaaaaaaaaaaaaaaaaaaaaaatgctgggtgtggtggctcaagcctgtaatcccagcactttgggaggccgaggcgggcggatcacgaagtcaggagatcgagacattcttggctaacacggtgaaaccccgtctctactgaaaacataaaaataaaaaaaattagctgtgcgtggtggcagacacacctgtagtcccagttactcaggagactgaggcaggagaatggcgtcaacctgggaggcggagcttgcagtgagccgagagcacgacactgcactccagcctgggcgacagagccagactccatctcaaaataaataaataaataaaaataaaatagaaagaaagcaacatcatcatcaaaaagactccacaaaaaccccattcataggtcagcaacctcaaagacttaagatagataagcccaccaagatgagaaagaatcaacacaaaaacactgagaactcaaaaggccagagtgcctcttctccacgtgatcacagcatctctatagcaaaggcacagaactgggttgaggctgagatagaggaagtgacagaagtaggcttcagaaggtgggtaataatgaacttcactgagctaaaggagcatgttctaacccaatgcaaagaagctaagaatcatgataaaacattacaggagctgataaccaaaatagccagtttagagaggaacataaatgacctgatggggctgaaagatacaacataagaatgtcacgatgcaatcacaagtaacaacagctgaacagaccaagcataggaaacaatctcagagcttgaagactatctttctaaaataaggcaagcagacaagaatagagaaaaaacaatgaaaaggaatgaacaaaacctccagtaaatatgggattatgtaaaaagactgaacctacaactgattagggtacctgaaagatatggggagaatggaacaagctaaaaaacatacttcaggatatcatccaggagaacttccctaacctaagaagacagggcaacgttcaaattcaggaaatccagagaacgccagtaagatactccctttaaagatcaaccccaagacacataatcatcagattctccaagactgaaatgaaagaaaaaatgttaagggcagccagagagaaaagcaaagggaagcccgccagactaacagcagacctctcagtggaaaccttacaagcccgaagagagtggggccaatattcaacattcttaaggaaaagaatttccaacccagaattttatatgcggccaagctaagcttcataagcaaagaagaaacaagatctttttcagacaagcaaatgctgaggaaatttatcaccaccaggcctgccctgtaaaagctcctgaaggaagcaccaaatatagaaaggaaaaactgttaccagctactaccaaaaaaaaactgaagtacaagtacgctgtgaagcacctacacaaacaagtctgcaaaataactagctagcatcatgatgacaggatcaaattcacacataacaatattaaccttaaatgtaaatgggctaaatgctccaattaaaagacacagaatggcaagctggatcgagtccagactcattggtatgctatattcaagagccccatctcacatgcaaagacacacataggctaaaaataaagggatggaggaaaatttaccaagcaaatggaaaacagaaaaaagcaggcgttgcaatcctagtttccaacaaaacagactttaaaccaacaaagataaaaaaagacagagaagggcattacataatggtaaagtgttcaattcaacaagaagagctaactattctaaatatatatgcacccaatacaggagcacccagattcataaagcaagttcttacagatctacaaagagacttacactcccacacaataatagtgggagactttaacaccccactggcaacattagacagatcattgagagagaaaattaacaaggatattcagaacctgaactcagctctggatgaagtggacctgacagatatctacagaattctccatccaaaaacagaatatacattcttctcatcaccacatgccattactctaaaattgatcacataattggaagtaaaactctccttagtaaatgcaaaagaactgaaatcataacagtctctcagaccacagcgaaatcaaattagaactcaagattaagaaactcattcaaaaccacacgactacatggaaattgaacaacctgttcctgaatgactcctaggtaaataatgaaattatggtagaaatcaagaagttctttgaaactaatgagaactaagagacaacgtaccagaatctctaggacacagctaaagcagtgttaagagggaaattttagcactaaatgtctatattagaaagctagaaagatctcaaatcaacaacctaacatcacagctaaaagaattagagaaccaagagcaaaaaaccccaaagctagcagaagacaagaaataaccaagatcagagtggaactaaaggagatagagacatgaaaaacccttcaaaaaaatcaatgaatccaggagctggttttttgaaaaaattaataaaatagatagaccactagatagattaataaaagagaggagaatcaaatagacacaatcagaaatgataaaggggatatcaccactgaccccacagaaatacaaacaaccatcagagaatactacaaatacctctatgcacataaactagaaaatctagaagaaatagataaattcctaaatgcatacaccctcccaagactgaaccaggaagaaatggaatccctgaataggccaataatgaggtctgaaattaaggcagtaataaatagcctaccaacaaaaaaaagtccaggaccagacagatttacagctgaattttaccagaggtacaaagaggggctggtaccctttcttctgaaactattctaaacaattgaaaaggagggactcctccctaactcattttatcaggtcagcatcatcctgatatcaaaacctggcagagacacaacaaaaaaagaaaactttggccgagtgcagtggcccacgtctgtaatcccagcactttgggaggctgaggcgggtggatcacctgaggtcaggactttgagaccagcctggccaacatggtgaaactctgtctctactaaaaatacaaaaaattagccgggcgtggtggcaggcgcctgtaatcttagctactcaggaggctgaggcaggagaatcgcctgaacgcaggaggtagaggttgcagtgagtcaagatcatgccattgcactccagactgggcaacaggagcaagactccatttcaaaaaaaaaaagaaaagaaaaaagaaaacttcaggccaatatccctgatgaacattggtgcaaaaatcatcaataaatgattcccaatactgggaaactgaatccagcatcacatcaaaaaacttatccaacactatcaagttggattcatccccaggatgcaacattggttcaacatacacaaatcagtaaatataattcatcatataaaaaaaactaaagaaaaaaaccacatgattacctcgataagacagagaaaaggccttcaataaaattcaacatcccttcatgttaaaaactcgcaataaacaaggtattgaaggaacatatctcaaaatagtaagagccatatatgacaaacctacaccgaatatcatactgaatgggcaaaagctggaagcattccccttgactggcacaagacaaagatgccctctctctccactcctattcaatatagtactggaagttctggccagggcaatcaggcaagagaaagaaacaaacggtattcaaataggaagagagaagtcaaattatctttgtttgcagatgacaagatcctatatctagaaaaccccatcgtctaagcccaaaagtttcctaagctgataagcaacttcagcaaagtctcaggatccaaaatcaatgtgcaaaaatcactagagagccaaatcatgagtgaactcccattcataattgctacaaagagaatcaaatacctgggaatacagctaacaaggtaagtgaaggatctcttcaagaactacaaaccactgctcaaggagatcagagagggcacaaacaaatggaaaaacattccatgcttatggataggaagaatcaatacagtgaaaatggccatattgcccaaagtaatttatagattcaatgcgattcccattaaactaccattgacattcttcatagaataggaaaaaaaactattttaaaattcacatgggaccaaaagagagcccatatagccaagataatcctcagcaaaaggaacaaagctggaggcatcaggctacccaacttcaaaatatactacaaggctacagtaaccaaaacagctgggtactggtacaaaaacagacacacagaccaatggaaccgaatggagagctcagaaataagattgcacacctacaatcatctgatctttgatgaacctgacaaaaacaagcaatggggaaaggattccctatttaataaatagtgttaggagaactggctagccatatgcagaagactgaaactggaccccttccttacaccttatacaaaaattaatgcaagatggattaaagacttaaatgtaaaaccccaaactataaaaaccctagaagaaaatctaggcaataccaggccggatgtgggggctcacgcctgtaatcccagcattttgggaggccagtgtggacgaatcacttgaggttaggagtttgagaccagcctggccaacatggtgaaaccccgtctctactaaaaatacaaaaattaggtgtggtggcgtatgcttgtagtcccagctacttgggaggctgaggcacttgaatcacttgaacctaggaggcggaggctgcagtgagccgagatcgcaccactgcactccagcctgggtgactgaggcaggcagatcacctgaagtcaggagtttgaaaccagcctggccaacatggtgaaaccccgtctctactaaaaatacaaaaaattagctgggcatggtggtgggcacctgtaatcccagctattcagaaggctgaggcaggagaagagcctgaacccaggaggcggaggttgcagtgagcagagatcacgccattgcactccagcctgggtgacaagagcgagactctgtctcaaaaaaaaaaaaaaaaaaaaaaaaagaaaagaagagaagagaaaaagaaaaaaagaaaagaaagaaaagaaaagaggtaaagaggaaaacctaggcaataccattcaggacatagtcatgggccaaagatttcatgacaaaaatgccgaaagtaattgcaacacaagcaaaaattgataaatgggatctaattaaaacaaagggcctctgcatagcaaaataaactacatcagagtgaagggacaaactacagaagggagaaaatgtttgtgatctatccatctgataaaagtctgatatccagaatctacaagaacttaaacaaatttacaagaaaaaaaaccccattaaaaagtgggcaaaggacatgaacagacacttctcaaaagaagacactcatgcagacaacaaacatgaaaaaaagctcaatatcactgatcattagagaaatgcatatcaaaaccacaatgagataccatctcatgtcagtcagaaaggtgattattaaaaagtcaagaagtaacagatgctggtgaggttgcggagaaaaaggaatgcttctacactgttggtgggaatgtaaattaaattagttcaaccctgtggaagacagtgtggcaattcctcaaagatctagaagcagaaatgccatttgacccagcaatcccattactgggtatatatccaaaggaatataaaccaatctattaaaagatacatgcacgaatgttcattgcagcactatttacaatatcaaagatgtgaaatgaacccaaatggtcatcaatgatagactggataaagaaaatgtggtacatacataccatggaatactatgcagccataaaaaggaatgaaataatgtcctttgcagggacatggaagccattatcctcagcaaactaaggcagaaacagaaaaccaaacaccacatgttctcctttataagtaggagctgaacgatgagaacaaatggacacatcgggggaacaacacacactggggcctgtcaggggcatagcaggagggacagcatcaggaagaatagctaatggatgctgggcttaatacttaggtgatgggttgatctgtgcagcaaaccacatgacacatgtttacctatgtaacaaaactgcacatcctgcacatgtaccctggaacttaaaagctgaagaaaaaaaaaaaaaccctctcaaacccctgtatggaaggaaaacattaatagtcacatttatctcacttgtatttgtcagagatttgtgaattgccttaaaaaaattcatgaggctgggcgtggtggctcatgcctgtaatcccagcactttgagaggctgaggcaggcagatcacctgaggtcaggagtttgagaccagcctggacaacatggctaaactataaaaaaaaaattagccaggcatggtggtgtgcgactataatcccagctacttgggaggctgaggcaagagaagcacttcaatctgggaggtggaggttgcagtgagccatgatcacgctactggactccaggtgagcaataaagtgagactctatctccaaaaaaaaaaaaaaaaaaaaaaattcatgagccacaaaaaattctaccctgaattccctaattaaaagtttggagaattaagttatgggaccatctttaagattgaatactgtaaggttccatataagaatttttaatgatgacattaaaagaaatgtaaatgacatggggagctactcaatccattgtgctgaatgttaaaactgggctcaaatcctctatctagtacagtccctagtaagcttataaatatatacacaaacatggaaacataagctatgaaatacatgaaaatattaaaaatggctacctctaggtattgagattatgaatgacttgttttcttctatatttctagatttttccacagtgagcatttgtttattgggaaagtactctaaacacccttgcattagccagctcgagtataacagtgaatgcagagaaaggaaggggaaaggaaatgaaggcaggttagctttctgctgcctctgatggctgcaggaggcatgtggccaaacagcagggaagaggatgactgtagagaaaccgacttctgtaagcgtcggtacacagatcacattttcttagaatatgaaaaaagtcaaggaatatgtttgctccaggctaatctagaaagttggttttcctagatttttccctaagccataaatcagaatagtccaagactctaagccataaagcattcaataataaaacttttcaaaaaattacatttagaatagatagaaaagttaatggtatcagataatacatccttctatcaaatttagtctagatttgtactcagagaaacgacataaacttgctttgttccttaacaatattagcatctgcctcaaggacctgggaattggagtaaagctcccacacagccccaggaggctgctgtgcctgttggctgaaatgaacaccatgtccttcctggtctgtctggtttgagcctgtcttgcagattattcctcagtttaatttcaagttaaagactctttagagttgaattgttttcccctttctctttttattttttattttttgagacaggatcttattctgtcacacaggcttgagtgcagtggtgcaatcatagctctttgcagtctcaacctcctgggctcaagtgatcctcccacctcagcctcccgagtagctgggaccacaggtacacaccatcatgcctggctaatttttatttttttatttttatttttttgagagttgaggtctcactatattgcccaggctggtcttcaactcctgggctcaagtgatctttccgttttagccttccaaagtgagccaccatgcccggcctccttttattcttgatcttgactcccattctagtactcatttttcccttattataaaaagcagtaaatgtgctgggtgcggtggctcatgcctgtaatcccagcactttgggaggcagaggtaggtggatcgcttgagcccaggagatcaagaccagcctgggcgacatggagaaacctcgtctctacaaaaaaatgcaaaaattagccaggtgtggtggcacacacctgtagtcccagctacttgagaggctgaggtagccaggagtttgaggcggcagtgaaccatgatcgggccactgtactccagcctgtgtgacagagtgagaacctggctcaaaaacagtaaatgtatagatgggtataaaatgaaaagcaccttcactttccatacccctctctagcgataacaagttccttgcgtatccttccagacatttactgcatatacaagcacctcttgtttgttaagatcatgttatatatactgtttggcactttgctttttattttcttttactgaataaaaaaaatcggcaccttttcatacgtggatttacttttctttcttttcaatgccaatctttttttttcatttgataaatatttacttagcctagctcactgttgtaggagggtgatccacagtaaatgatacaaataaagtacctgctgccaaggtacttacattctagtaagggagacataaaatcaaccaatcatcaatcagtcaacaaagaataaatgaatgaaagtaattttagagagtgatgaagtgaacaatgaaagggagctgaaattgtaggaagttgggacagacatggccattttagattaaggagtctccatgctgcccaggctggtcttgatctcctgggctcaagtgatccacctgcctctgcctcccaaagtgctgggattacaggcatgagccaccgtgcccagcacatttactgctttttataataagggaaggtgcctctgaggaggtggaatatgaaccgagacagaatatatgaagtaaactaggcaaagaagtgggagaacattccagaagagagaatacaacatgtctgaaggctgaaggcaagaacaagcttgatggtctgaagctcaccaagatggccagtgtgactggcgatagtgagcaaagcatagactgatccaaggtgaagtggaagaggtagacggaactaggtcagttagggagactgttggcaaatctcaactttctaagagaaggtctagcatggtgaggaggacagctgtcctgggagcttgaatcttctctactccctattcaacattagagtagctacaaaatcttagggaaatcccttcacccctccctggatctcagctgctttttcatctataagggacagggctgttaggaagagaaggaaatgttttgtgctggaagactgaagctgaagcaggggaaccctcctgatctaaaagctgtgtgataggctaaataatggcccccaaaggtatccacatcctaatccccagaaccagtggcgatactatcttacggcaaaagggactttctagatgtgattaagttaaggatcttgagatggggagattatcctggattatccaggtgggcccaacataatcacatggatcctaataagagggagcaggtgggttagagtcagagagagaggtgaccacagaagcagtgctcagaatcacgtgagccttgggccaagaacatgggcagccccaagaagctggaaaaagcaagaaatggattctcccctaaagcttccagaaggacctgcccacccattttagtcaccgattatagacctccagcactataagaaaacaaatgtatgttattgcaagccactaagtttgtggaaatttgtacagtagcaatcagaaatgaatgcacactgtaaccatatgattctaaaatgccttggaatcaagcgaggtagtactcgcctgtggtagaagataagcagaaagtgacaaggagaaagctctggggagaagcaggaagctctgtgggaggaaggggaaaatggggcttggggctgtggagtttgatgtgagctggcttcccatcagaggacccatataagctattaatacttcctatatttaatgttggccaagggtctggcttggggatgagggccaaagggatggaggtgaagaactcagtgtctgaagagaggaaaccattttttcctcaaagtttatgctatacaattttaatatgttgccttaagctaccttaaggcaagaatttgggcaagtccaagccaataggaggtaacaactatcctggtttgcctagggccgcagggtctcctggggtgcaggactttccattttaaaacctagggtctggctaggcacggtggcacacgcctgtaatcccagaactttgggaggctgaggcgggtggatcacctaaagtcaggagttcgagaccagcttggccaacatagcaaaaccccatctctcctaaaaatacaaaaattagctgggcgagatggtgtgtgcctgctactagtggggccgagggaggagaattgcttgaacctggaatgcggaggttgcagcgagccgagatcgtgccaccgcactccagcctgggtaacagagcaagactctgtctcaaaaacaaacaaacaaacaaacacacatacctagggtcccaggcaaactgggatgagttgattaccttagctgatagcctaaaggggtctccctgactagggcagaggctactgggccacctatatagcaacactaaaatgcaaaaatgtacaggcatctaacacatgttgctctggggaataaaccatacccctctggtgtcagccgcataccctaatttggtactataaaactcatgtgtctggccacacattcccaattcacaggaaaccatccttggattccaaaatgggaaatatctgcagaggtcatcacgaagcaggggctgggaatctcagctgggcaagaaacaaggcctgtgtgtgtcagaaacaaatctgtcaggccaggcacattagctcacgcctgtaatcccagcactttgggaggctgaggcgggcagatcacctgaggtcaggagttcaagaacagcccgtccaacatggtgaaacccggtctccactaaaaatacaaaaattagccaggcatggtggcacatgcctgtagtctcagctacttgggaggctgaggcaggagaatcgcttgaacctgggtggtggaacttacagtgagctgagattgtgccactggactctagcctgggcgacagagtgagactccgtctcaaaaaacaaacaaacaaacaaacaaaaaacggccaggcgcagtgggtcacacctgtaatcccagcactttgggaggccaaggtggacggatcacaaggtcaggagttcgagaccagcctggttaacacagtgaaactctgtctctactaaaaatacaaaaattagccaggtgtgatggcatgtgcctgtaatcccagctactcaggaggctgaggcaggagaactgcttgaacccaggaggtggaggttgtagcgagctgagatcatgccattgcactccagcctgggcaacagagccagactccatctcaaaaaaaaacaaaacaaaacaaacaaacaaacaaaaacatctgttaactaaggggctgccagtcaccataagagatacaggaaagtgcatgctgccagcccctgctctggggagtgaacagattcagtttatggtcctccccagcctcaccagacccttcccaccttcccccaggctctcagccacttgctcaatggggagccctgcaaagaaagctgcatcattcctaaactgaatcctggcccaatcactaaccagctgcatgaccctgaaggaattattcgactttgctaagcctgctcgctcatcgcacagatggggatgataccactttccttcatacagggaaaaatgacagcactgttgtttgcacctggcagggctctagcttatacttccacaagtaaaactcatcagcatcctttcctccctttcccacctgagtgccaagggacaaacacacttaggaaggagctgggcgagtctgggctggggtaaggtaagagcggctgcagggtcaactatgggaccaagacaagctcagaaatcatctctcgctcttccaccttcagctgtaacttccattaggagctggcaagtggcacgcaaggtaggctctctgataagagggaaagagacatttgtcaagaactcttaccccaggtcacttacctctcacacttcatttccctccctcaagctgtcttgttctgccacaaaacatggcaggcagagtgagcccagtaaagcaatcagatccatcctctctctcaaaaccctccaagggtttcccaactcactgggagtaagagcccaaatcttcactgcacccatggggtcctgcatgagctcccagcataacctgcagctggactctgccctgcatactcccctccagacacacctgcctcctcactcttcctcagatacatcagatacaccaaacacaccccctcctggggcctctgcctagctcctccttttttttttttttttttttttttgagacggagtctcgctctgtcgcccaggctggagtgcagtggcaagatctcggctcactgcaacctccaactccctggtttaagctattctcctgcctcagcctcccaagtagctgagattacaggcacctgccaccatgcccaactaatttttgtatttttagtagagacggggtttcaccatgttggccaggatggtctcaatctcctgacctcatgatccacccgccttggcctcccaaagtgctgggattacaggcgtgagccaccctgtcggtccgagaccctgtctcttaaaaataaagatgaataaagaaaagaatggctgagtgcggtggctcacacctgtaatcccagtacttttggaggctcaggcgggcagatcacttgaggtcaggagttcgagaccagcctggccaacatggtgaagcctactaaaaatacaaaaattacttgggtgtggtggcacatgcctatagtcccagctacttgggaggctgaggcaggagaaacacttgaacctgggaggtggaggttgcagtaagccaagactgtgccattgtactccagcctgggtgacagagggagactccgtgtcaaaaaaaaaaaaaaaagaaaagaaaagtagagaaatgagagaacctggctgggagatcaggagacatgtcaaaggggaagaggtcaatacagtgataagaaccttcaagaagcaaaggctttatgcggggtagaagagaagtggtctggaagctgcaggggaatcaagagggacacaaccacatgacttctggtctttccagctcacaaattctgacatatgcaggtagggatagacccttccactgtgggtctaaaatctggccctagcttttgagggcaccacactcttggcaggacaaaaaaaagtttcttcttttggattgactacatttgccccctgaggttccctttgaaaagctgcatctctgctctctgtcttaaggcaacttacaaattcacagaaaacctgaaaatatccaggcatgcagcctgcactattgaataagtgagtttctggagaacgccctctgcatgaagctcaaaacgggtttggcgaaaataatctgaagtgagcctgagctggcactctgattgcctggggggaatccgggtcccaacacttagcaggggaccttcggtaagtcctttaattctttgtgcctcagtttcctcatctgtcaaatggagaaattagatgacctatgaatacttttcaccatgttggccaggctggtctcaaactgggagaaggatttctgggaaaacttttgctttgctttcttgatagggagcaaagagagattggtgtccatattcccccttcttcctgccttggatacagaagtgatgtttggagctgtggcaatcatattataatcatggggcaaatgccactgctctaaggtgtggagaagaaaggcagaaggagcctgggtcccttggtggggggtgcatggtgcagctgaacaacagcaggtgatcatccacctttgctcttgttatgtaagaaaagtaactctcaatttgcataactacattatttggggtttacagttagtgattgctggacaggatttctaagcttagagtgcctcctatttaaagaagacccctaggaaagcacagcacacgctagatccaggtcatccacttctcttaagtgatcttcagagatcaaaaggtaaaggccctagcacgaaccccatttttccattccacatagaatgtaaagggtggcatcgattaggaatggcaggagaacaacgtcaaggtgtgcaggagggcaccgtgggaggtgctcagcaaaggggagatgccaccctcagagctcaaaagtgagcagatacaaccacttccccaagcctggcccccagcccaagctctgctgaggaggagccctctgacaaagtaaaggaacgctgttttggccaagagccgctgaacctggctatttaatcgctcactcataaaaatcacagagccagttctgaattacggtggtggtggtgaagaatgcaagtttaagatcgctatggcttttttatgccaatccaccacatcgatccaaaagctttttaaacagccttaaacgaactgaacggttgaatttagtgagctcctccgtttcccttctctctccgtcatccagctccccgccccaaggataggggagaggttggaaaaatgagctttgaaattgcagtctcataaaagcaaaactgagaaaagatacaacagtgatggagaaagccagacgggcattaaaaaacaaaacaggagtctctcctaggccgcgcctacacgggctcgccgcgctcgctcgtcaccaccgacaccccaccccctgccctccgcatgggaggggcaagaacgcgatccgttcgcagcttccaggcaggtgatgaggatagctagtcccgcggtcctccgctagctggcggcgggggtcggccaggtgcccggaccctccgagggccccaccgccgcgcgtcccggggatcgggaccgctacccgcgcctcacctgcgcgcccgggccccagggccctgctcccgggcggtggcgcgggcctggctcccgtcgcagccacgaccgcccccaccgcccccgccgtccccgcccgggaagtggcgagccggtccggcttgccccgcccgcctcccggcccgcactcacgctccacatcgtgcagcttggctcgctcctcctccagcttgcccttgaggctctcggcctcgctcttcagcgacgccagcgtctcgttctcgtgcagcccctcggttgccatcttcgcgcggggacgcagcggagagggaagcggagagcgggaatgcgctgagccgcggcgggcgccgctccagcagccgtccccggccccgagcaccgccccgcggccccgccctccgcgatgacgccagcagctgcgggcccggctgctgcgcctgagccccaagaccccgcacctgggcgcgcgctctggcgcagtgcctggtgcgatgtccgcgtcagcctctctcctccgggagaggcagggagtgtgacgcccattttaccagcgggcaaactgtggcttagggatgctgggtgatttgcccgaggacgcacacagagggaagggccaagccgggattccaactcgggactccccgcttctggggagaccggtgaggcccccgcgacatggccctcccatccccaagcctctcgtgcagatctccgctctgtgggacttgattgcgggctgcgggcccgtggctcctgcaggcagagagaggacgggagaggagacggctacgaggcttggccgcaggtagctacggtgctcccccaacaaggaaccggaaaccctcttcgtttgttgatctaaatatacaaaaataaaactagttgctgggttctcagacggagtctctgcggcattaggaggcccacccttattttctcttttcttcacgcaggaatcaggtccctggcctgggggcggcaaaaggagatggcggtgggtcaagtgggcgcgcaggctcagacctggggcttctgagcccacgcccaggcatctcggacctctcacttctgaggccacctcctgccctttagaatgaagggctggcacagttctgccaggatgcacgtttagcgacttctgtcagactgaagcatcccctctccgcaagcgcctgaagtgtgagaggcactgttctaagtgctttaatttgcacttgtttaatcctcacaggagtcaacttgaatgggcacacttattcccactttacagaagaggaaactggggcacagaaagactgagtaattgctcagggggcatgctccaagaaagagggagagacaggatttggacccagacaggctggctccctagtgctctggactttggtgtggatgatccaactcaagccttctcctttttccctcctatgtgatcttgcatgcgtttgtgcagagaatgagaaggcagatcaaagttacagatgctgcgagaacatcgccaagcagaatcttgggtgctgtccccacctctctgtacctgctccctcccagagaagccagcctccacttgctgtcccgggccttctctatctgagaaaagttgaaggtactcgatgttaatctgtacatagttgttttgcaggttagagtctgggatcctccgtttccttatctggaaaagcttcttcataggatctgcttcataggattgttatgagaattaagtaagatggtgtgggccgggtgcggtggttcacacctgtaatcccaacacttcgggaggccaaggtgggtgtatcacctgaggtcaggagttcgaaaccagcctggccaacatgatgaaaccctctctctactaaaaatacaaaaattagtcgggcgtggtggtacgtgcctgtaacctcagctactcaggaggctgaggcacgagaatcgcttgaaccctggaatcagaggttgcagtgagccgagatcgtgccactgcactccagcctgggcaacagagcaagactcaaaaaaaacaaaaacaaaaacaaaaacaaaacaaaaaaaggtaagatagtgtgggtgaagactttagcagacttctccgtacatagcagatgcttattcactgctagttctcttttccgttcccatccgtataataataggtttacttgtcgctgttccttagtatttagatatttagcatagtacttgcatatggtaggtgctcagttaatgctagtttattaaatggatgtataaaaaatatataaaatatataaatctgtataaactatgttaaaaatataaacatataacaaacatgtttataaatgaataaatatataaatacaattattaagtataagataagaatatataaaagcaaaaatattacacctgtttgagagtttgtaaagcaaaaggttaagagcacaggctctatctagatctgactgcctgggggcaaatcctggctctgctctgtggcctgagggatttacttgtggtgcctcaggctcctcatctgtgaatgggggacaacacctccttcagactctgtatggcattcggagagagcagtgcgtggcacacagtatgcatctgttattattactgaggctgcctgatacgcttgagcagttcacatgaggtaatttaaatgagacactgggtcatgggggattcttctcacaagggccatctcagggggcccaggcaaggcagcctcatctcatcacctccttaggctggctctgtttggaccgttgcaggatgtgtgtgtggttcaaggtcctcctggctgtgaagacctgaggcacgtggtacttctcactggtgtgtgccctcttctgggggttctttgtgtaaaataaacctcgaacagcctccaacctggagagtcaactatctagagatgaggccatcagacttttaatggttaggcagttttccaagtactttcttgtattttggtgttaactcccactgaggaagctggatatcagaaaagttgaggtcagctacattccacagtggttgagataaagggtcactcctattcacaaaaagggcccaatggggactgtgtctacataatcccaaacagttggatgaaaggccagctgtcagtcactggatgtctcttcagctgaatgatgctgtctgaatatttgggaacccccaagtagagagtagagattgtattaaagtaattgtggtttttgccattgctttcaattgaaagcaatgagaattgttatgagaattaagtaagattgtgtgggccgggcgcagtggttcacacctgtaatcccaacactttgggaggccaaggtgagtgtatcacctgaggtcaggagttcaaaaccagcctggccaacatggtgaaaccctctctctactaaaaatacaaaaattagccaggcatagtggtttgtgcctgtaacctcagctactcaggaggctgaggcacgagaatcacttgaaccctggagtcagaggttgcagtgagccgagatcgtgccactgcttcaattgaaagcaatggcaaaaaccgcaattacttttgccccaacctaatagtagcgctagctggcaactattccctagaaaagtatctccaggcatggcccctgtgctagggagaacctgtgtgccacagaggactcaaaatctgggattcttgggcttattccacctgcagaggaagttgtttaaaaagcagaagagttagattaataaataatggggggggggtaaggcccccagaaagcaggtttatttttaagaactaaatgtcctcagttctacaatttgcagggccaagttagaacgtagactgtagaaatatactacaggtagaagcccactacacctaggctgaagacatatccaaattgctatgctgtatcaaagcctttttatgccaccctgggctgtttacttgctatttgctttaagggaataatttttaatgtaatcatggtcaggggttacagtggaatcaggaggataaaaagtgccttttctttttcagttagataaaatgtaaaagtcatctttcctctctttggttgtattatggattttgttgttgtttttttaaatgtgtggggatttcctactgggcttttcaggaggagtgctttaccacttttcaccaagtgggggctctgctcagctgcactattgagcgcagctttgcaaattctcagagataggactaattcttagggcttcagtgatgctgtgggcatttttgctgcaagatctgaagcctgtgcacagccacctctggtgaggacttgattttgtgtactttgaaaaattccaggatttgtattccattcctagtctttgttgaaggcttaggcccaaggagtacttctgagctgaattttgctcactactgaggccctgtgagattccatcttcattagagctggacctacacaccactgggaccggtccttggaaagatgctcctagactgtttatttgccagcttctcttttagcttgattgcctgccaagcagacttgtagaagtcagaagaaaaaagtattagccctaagaaataatagaagctaaaacattcattgagtactttccttgctgggtactatttaaaataagttatcaaatgaaatcatttgatcatcataaaactcttatgatgtaggtgctattagcattcctatttgcagatgggaaaaacaggcttcaggagagaggtgagaacctccttgcacaccaataactaggaacatcaataggatttggacccaggcagtcagacaccagagtccacaccctgaacctctgtactatactgcctcaccaagcccaggcatactgaaaagtgtgtgttatataagctgattctatggcatctcatctgtcacaggaccctcgcttgactgttttaagacagataactgaattttttttaagtggcacttacaatttctgcacatgttgaacagtagctgagttgttgagacttcttgaaaactggtctcagagctcgttgtttgaaacatttgtcacatgagccaaatacattaacgagaaaggtctgatcacacatcttttacccaagataaagctgaaaaaaagtgaaaagaagggagggggtgtgagaaaagccaatggttttaactttctaaaatctcttcttgcttgtaccgtggtagctattcagacgtctacatgtgggatagagtatatgcagttaatttataacctttcaactattacaacatgctgggtcaatacaactcatttaatcagtgagaaagcatcagacaataggttttctgaacttaacacgtttaaccagttttttggcagctggcagacctgcgtcaggcaggattgatccttgcagcacaatatcaattctgtggggtttcacaatggaaaacgtttttgtaatggatgctataacttaaaacttttaaaaacattcctcccctcagggtgaacttttaaagataagggtcagcaaatgatggagcctgaccccaaccaaagccaggggcctgagtaagtgtggtgtgggttccgtgcaaggcaagcactcacttattaaacatttgacagccaaagacccagggtccctgcctgttcacaaggaagtcaacagacaggcccaggccgctgcagggaggcagcacaagcatctagtggttacagggacaggctctggctgcctggtcccggcccaccactgaggctagttagctgacctctctgaagcttggttttgctaatctgtcaagtggagatcttaaaatctacccttctggggttgtcaagagaatgataagagtcagtgcgtaaagcacttagctcaaggtcggtaatacagggagtgtgccagcgaggtcatgctgccctgagtggcagcaatagcgggaacagtggctgccttgggaaggagggacatgggtaggggcagggtgaggctggggatgccaaagaaagcataagaggagcctatggcaacggttcagacaagacgcgaggaagtcatggactaaaggtgagaaagtaacttttatctgaggaatgcaagcccttttaaattatcaggcccagagaatcatgaaaatgagacagcaataacgttctagtccccactttgagctgtgtattcatctttttattattattattattattattattattattattattattatttgggacagtatctctctgtctcccaggctggagtgcagtggcacaatcttggctcactgcaacctcgttctcctgggtttaagcgattttcctgcctcagcctcccaagtagttgggattacaggcataagacaccatgccaggctaatttttgtatttttagtagaggcagggtttcaccatgttggccaggctggtctcaaactcctgacctcaagttatccacccacctcggcctcccgaagtgctgggattacagacatgagccaccacacctggcctcatctcttgaaactgcttgccattggcacaagtagctaaaaaataacctaataatgccacactggacactataacccacaccctgtagtgtaacaatgtataaccagtcgctaatcaatgttatttctgtaaactaatgagaattcctaacaactttgtatcagcccactcccggtccctcttttttgcctttttaaaaaaactgcttgtaacaaaggccaaacagagataatgtccaaggttacttgggtctgggccttccaggaatctgtcctcactttggctcaagtaaactccttaagtcttggtttgtgctacagcctcttccttttaggcccacaaagcaatgtagtgggatggacttggaccatgcttaggaaagagagaaggagctggatttggcatgtggagttgaggagagggagatgtgggtgctgtggcctagatttctttgggagaccgaggggttatgttgccattgctggagatgaggacaaagcggttaagggggaagggagcagccagtgtggccctgtcaatttggtaggtgttctagagtgagccccgtcaagattcaaagaaatgaacccctgaacataaagataattgggggcgctggtctgaacatttcaacagagtcaaatctgagagggatgcatttatgggggaggtgacagttggggacatttctgatgaggaacgtctgccatgtggagcccaccctggggctggagagataatgggggctcatgagttgggctgagctcttacagcaaaggggcagtcagcacagttcgagacctctgggcaacaaaggtgtacagggcatcccttagggacaacagctcgcaaggaaaccagctaccaactgccacagagtgcccagccctcgcctctccctgggagggaggcaggacatctgtgttacagctgaggaaaagcagggggattaaacaagttcaaggtcagcggcagagctgagtctgtaagtagcatgaatacacactttggaaccctatttccaagctagcatggtcaagctgcatggttttgtcacaaaaggtgagttaacaaaaaagggcctgccctccagagcctggcccatggtggggcttggtaactgttgcatcccactccccagccctgtaaaggcagccagtaacaaggttgggctgaacactcccagtaatagcattaggacggtgagccacaggctgttaagcaagggagcagtgtcatccacgtggattattccagcatttgtgcttccagaagtaggtcagagagagagagagaagggacggcaggaaaacaaactaggttaagagattgctatgttctggagaagaggaaatgagctgcggacagaggagcagctatgggaatggaaggcgagaggaacctatggcaccaagtggaggaggaatagaaggatggctgggaggcacgggagagaaagacaagttgaaaagatagccgatattccatatctagatagaggcaatgtttttcttctcaaactaaattttgaattttttcaaattataaaagatgctgataatgttcattataaataactggaaacagggccaggtgtggtggctcatgcctgtaatcccagcactttgggaggccaaggcgggtggatcacttgaggccaggaatttgagaccagcctggccaacataaggaaacctcatctctactaaaaatacaaaaattagcctggcgttgtggtgcgcacctgtaatcccagctactcgggaggctgaggcaggagaattacttgaagccgggaagcagatgttgcagtaagctgagatcatgccactgcactccagcctgggtgacagagtgagactccatctcaaagaaaattaaaaattaaaaataaataaataaataagtggaaacagaaggacacaaaaaggggaaagtaaatcgcccacatgccctacaccaacaactgacctgttggcattttatgttttcctctagtatctttataagtatatatgtgtgtactttttaacaaattggaattatatgccatatactactttatataatagcattttcatcttcacgtcattgcatattactggaaaacaccattttttaacggagactccaatttttgagtcctatgggccttaagtcgtatcacatagctagcattttagacctcactggttaaacatgggcaagctacaaactaaatttaaagcatttttaaactgtaaatattatacatatgcattgtagaaagtttgggggaaaaaaagatataaggaagaagataatcacctataatcccaccactcagagaaacttctttttacattttggtgtagcaagaatagatttgagaccactgaggtcatactgttcatgtatactgattacatttctgtatcttgatgtttttcacttagtatttgtatcagctaaattttagtactttgttgtacttattgtcaatatcctttttatgatgagagaatttttcacagctagagccaatgtttcgatgagcattttgacaagaaagacagaaatgccccatttaacaaattttgacatgaagttgctctgcagtagttcatagaacttctcaaaccttcccctaataactttatgccaagcacaaactttctttgatatctgttttacctaaatatgtgacttaaaaaattaccacagaaatacgtgtttattttaaaaagaaccagtaccaaagatgaaaaagtaaaacttgaatcccccatcacatgccctgcattttcactgcccttagtttgttgtttattcttccagacttttctggcacaaacacatagatacagctttggtagtcatgcaaatagggctacttgctttcttcatctaacttattctgttaacacttatagatcaaccttgtttggtaataggttcagcattattctatgctgtggagtgtcataatttattaaaccaacttccgtgtttggatacatagggtatatccagtttttacttttaaaatactgcttcattaactcaattaaaaatggacaaaaggaccttcatacattgctggtgggaaggtaaagtggggtagccgttttccaatggtgcagctgtggaaaacggtttggcagttattcaaaacttaaatatacagctgttaccataagaccccgcaatcctacttctagatatatacccaggatacttgaaaatgtatgttcactggctgggcgtggtggctcatgcctgtaatcccagtactttggaaggcccaggcgggtagatcacctgaggtcagcctgggcaacatggtgaaaccccatatctactatacaaaaattagccaggcgtggtggcaggtgcctgtaatcccagctacttgggaggctgagacatgagaactgcttgaacttgggggatggaggttgcagtgagccaagatcgcgccactgaaatccagcctgggcaatgcagtgagactccgtctcagaacaaaaaaaaagaaaatatatgttcacataaaaatgtacatactaattttcatggcagcattattagccaaaagtgaaagcaacccaagtgtccaccaaccgacaaatgaaaaacaaaatgtctatccctccagtagactgctattcagcaataaaaaagaatgacgttctgacacatgctacaacatggtcaaaccttaaaaacgctatcctatgacagaagccagacacaaaaggccacatattgtatgatttatttatatgaagtgtacaggatcagcaaatccatagagacatgaagcagatgagtagttgcgaggtggagggaagagagaataagggggaaggagggagctgagagtgagtggctgcttaaggggtatgggatttctttttcggggtgatgaaaatactctggagtcagtggcaatggttgcaaatccttgtaaataaacttaaaaaacactgaaatatatgttttaaaatgatgggttttaaaacatgaaacaaaacgtggacatcatatctcaataaatttttttttttttttttttagacagagtcttgctctgtcgcccaggttggagtgcagtggcgcaatctcggctcactgtaagctccgcctcccaggttcatgccattctcctgcctcagcctcccaaatatctgggaatacaggcgcccgccacctcacccggctaatttcttgtatttttagtagagatggggtttcaccgtgttaaccaggatgctctcaatctcctgacctcatgatctgcccgcctcagcctcccaaagtgctgggattacaggcatgagccaccgcgcccagcccaaagattatttttaaaatggacaaaaggcttgtgtagtcacttcacaaatgaggatacttatatggtcaataaacatataaaaaggtgctcattatcattagtcatcatagaaatacaaagtaaaactacgatgtgatacaactacttagccatcagaaaacctaaaaagcctgacaacacaaagtgtgggcaaggatgcagagactggaactgcctttctctgctagtgggagtataagtcggtataaccactgtagaaaactggttggtaggagctactaaagtgaaacggatatagtctatgaccaggcaattctactcgtgcatacatacaccacagaaaataatgcttatttccttaaaaaaaaaaaaaaaaaaaaaaaaaaaaaaaaaaaaaaaacataaatgtcatagcagctattcatagaaggcctaaacttgaaagacccaaatgttcaccagtcacagacgaaactgtgaaatgagcatagaataaaaaataactgatacacacaatgtggatgtatctcagacttacaactaaaaacctctttctaaccccataagctgtactcagaggcttatgttgccatgtgtcacctggatcaaattttaaaactgacttagtgattttaagtatgcttaatctctttcctgatgccaatattaatgtaaaaaatattgaaatatttcaatttgaaatatttgaaatttactatttcaaaataaattcatgtgtattgtagaaaaattagattctacggattaacaacaacaaaacccctcacccatgctcccaccgcacagaaagacctgctaacactgtgccctgtactcatctggatgcttttctgagcatttcaaaagctggagtattttaaccgaatgtcagcatgcacataccttccagagtcagcactgggagccacagagcagatggtgagaggtgaggaccagcgcgcagcttgaggtgtgaagcacgtctcccactggctaatctccttatcttctctggagtgctgctcagcttgcttccttcctccacagcacttccatgctccctgctgggcacgcactgccatctgcatccctcactcacccctggaacctgcccagcccctctgtggagggaggccttggcaggtttgacctctgtgtctgcgcccactcactgagcagccctcacattcacctgggccacatgttcttaacatttctctattttggtctccttgccactgtcagctttgtagaactgatcaagactgtgggatgagtgcctccctttccccatttttccacacataaactcctcagcctccacaggtctccctgtccccaaacatgacctactttttcccatggttgactccccaccacacacacacagtcctccaacgggactttgctccttcagttctcttcccacctcatcagcagtaggatgaaggcagggatgaggaggatgtggcacctgccctctggggctcacaggcctacagaggaaatgggcagcatttctggcttccagtccagggtaagtgctataaaacaggcataaatcctgagttatggaagccgaaaaccaacagtgatggctcctcatggtgtggggaaggtctagaaagggcatggaggccgcagctcaggatcagaaaccctgccaattctctgccaagtagcccctcattctgacagtgtggaagcgccctggagacacagcctaagccagcacttatgacatatttacttcttctctaaacattttaatatactttaaatgagatattatgaatctataaagattctagcatctttcagtatgaccgtaaagaaaggcatacaacttgtacacttaagagacatgtcatctcctcgcaatgaaagaatctgacccaattcatttggtaattaattttattgattaaagtattacaaagttctacttttcattttttcatgtacaatgtattgaaatgaactaaactcaatcacttataatataaaaagacattattatgtattagcagggtgatgcttcataatcatgtattattcctacctctaagacaccagtctgtattatagaatcacagctgtcacctgtgactgtcagaaacagaaggtgcaattgggattcttaggttggtgacagaatagcactggatccacaggccagagactaggagtgcttatcaaatgaggttttaggctctgaaaggaaggaatgagaaggtgtgccgggacaaggaatagccagttcccataaaacttgggaaacgtagatttctcaaaagtagggtccgacacaattttttagttactttttgagaaaatttaaaaataaatacattgaaatgctgattagagagcgaaagtaatttaggttgctttttcaatctgaggttgttttaaaaaagttattgtatgaaaggtattaaaaaataaaa

SEQ ID NO: 234 - DNA, 194528 bp, Homo sapiens
  source 1..194528: mol_type = genomic DNA
acctcccaggttcaagcgattctcctgcctcaacctcctgagtagctgggattacaggtgcccgccatcactcccggctaatttttgtatttttaatagagacgggctttcaccatgttggccaggctggtctcaagctcctgacatcaggtgatccacctgcctcagcctcccaaagtgctgggatagctgtcacgagccactgcgcccagccgccaaaacactttcagggaaggttgtacccgcgtagaggtcctttggcagcatgtgacagcttgtatcctcctgtgttgctgccagcatagagcccaaaagctcttcttaatctttctttgttttgttttgttttgagacagagtctcactcttgtttcccaggctagagtgcagtggtgcgatctcggctcactgcaacctctgccttctgggttcaagcaactctcctgcctcagcctcccaagcagctgggattacaggcacccgccaccatactcagctaatttttatatttttagtagagacagggtttcactgtgttgcccaggctggtgttgaactcctgacctcagatgatccgcccacctcagcctcccaaagtgctgggattacaggtgtgaaccattgagcccagccttcctcctagattttcttttcttttctttttttttgagacacagtctcactctgttgcccaggctggagtgcagtggcgcaatctcggctcactgcaacctccgcctcctgggttcaagtgattctcccgcctcagcctcccgagtagctgggactacaggagcccaccaccacgcccagctaatttttttttttgtatttttagtagagacaaggtttcaccatgttggccaggctggtctcgaacacctgacctcatgatccgccctcctcagccttccaaagtgctgggattgcaggtgtgagccaccgcgcccggccttttttttttttttgagatggagtcttgatctgttgcccaggctggagtgcagtggcgtgatcttggttcactgcagcctttgcctcttgggttcaagcaattctcctgcctcatcctcttgaggagctgggattataatcacttgccatcacggccagctaatttttatagttttagcagagacgtggtttcaccgtgttgaccaggctggtctcgaactcctgacctcaggtgacccgcccgcctcgggcttccaaagtgctgggattccaggcctgagccaccgcgcccggcccctcctagatgttctaagtacaaatccgaaagcccactgggcctgaacgtccctggtttgtggtgctgcctccaggggtcccctcctgttacctcttccctgggccggtgaagggagggtggacgggatggtgtggggccgcgggtccccatgcctggagccaagcctggggcatctgcttgcatgctaggagctccctccccagcaaggcccgggccagagagagaaggaacagcccagagccaggagaaaagggagagtgaggctttttattgtgtatgaattcacgtggtatcgacaactccacacaatattaaaacactgcgagaaagtgggtgcggcacacctggaattttaaaaaagtcagaaataaaaacaaccagacatcccaatgcagatggcatagaacctgctagaaccacaggcggcggctggaaacaggagacaggtctttacgaaggttagatgggcagcggttccgtggacagaggaggaggcgcggctggccggcatatggcttctgtgcagagggcctggcctcaggccgtggactttttaataagtgaccccttgaggaagggcgtggtggctccacctccacccggaagcccccccgggtcactcacgggcggacaggtgtgtgacggccctctcctacctgccccagaacttgggcaggacgggctgttaacttggagatggatgcgtggcctggaggcctagcgttgcgcctcggacacggtggccggcccgtcaaagggaccacgcagaaggagggaaacaggagcaccttccgccctggcccagccgccccgtttatgtccccagaggccagaggtcgcagctgagctatctgtgcttggcctggggttacccctggggagggtgggagaggggtgagggttctggctccttcctggagagaggagggcaggggaggcggagctggtccgggaaggtgcccaggtgggtcacaacagggtcggggcctggcccgctgtggcccttcacctggctactggtgtctcgctcagcagcggggaaggcccgtgggagacccaggctacagaaggagaaacggccttctctctcccacccgacgctgccttgtgtgtgtgcgtgggtgggggtgagtgtccttaactctcttttcccctggcgtagctgagagaggcttgtccccccaaggctagagctgctgctgccacccccgcccgccagctccccgtctggaggtgcacgcgcgctcctggaaacgcccataaaacatgcgttcaccccagggattcccggcagaaaagcacatgtggcggtcggtgtgtgcactcgggtgccacgtctgcaaaggtattttccacagtgtggtcactgaagtctactcaagaaaaaaaaaagtggagaattttttttttaatcccccaagctagaaagaaacccacaggcttctggcaatggccacctccctggggtccgggagatggtggggtctggacagctcagggaacccaaggccctgtggacagtgaaggagaggccagcctgtccttcccctccccgagcctcagtttacctggaacgctcagcccgtttaaccccaccatctgcaccagcctaggagccccggctgcctggggctgcgtctctgcagcagcctccgttccctgctggcatttctggggtcacattgtgaggacacaccagtggggccgggcttggcacagctgtgccccctcctccctctgccctggcagcgggggctcggggattaaggcctcttttaaggaaaaacggggtggggtgtgtttgttcccagttaccaagatggcttgttggaaagggtggaggcaggcgggctctccctgcctggggtcctcccagggtctctggaacaggcttttgtcccttcctgccattcctgctatgcgtggtggggacgcccacaccccaaaccctgccggctcccagcccaaccacaggaggctgcagtctccgggagcctctggggctctcccgggccaacagcaggtttggcgggtagggctccccgaagccccagccctcccggacctgccgtagagagctgggtgccgggggtggggagcccggctgtggcctgtgggagctgcccgaggttgaggagtggaggtcactcccccgacacctgcacacacacccggagccctctagccttggcgaggtgggaaccctggcagtcaccagctcaggaagtgagccaagcagggatccccgcctcacgggcctgcacggaggacctgggcggccgtccaggaaccctctcggcacgggttcttagacgcctgtctccactggggccggagggacaggactaggctagttttattctactacttgcttctaggccagccccgtggagggggtcggggcggccaggcctcctgcgatcagggctgcgtggggtccatctcaggtgtggccgcaggtgatgccggcaggccctggaagatgtggctgcacctgctcccgtccgtgccgcagaggaggacgcagtcatctttcagaagcctccccccgaccccatgacatcttcgatttccacttgccgctgggaggagtggcccatcctgcgtctaaggcatctcccggcctcagacagccgtcctgggttgcacgggggtggaaaagcaaaaagatcgggttcgagcgacagggtaacgttttgagcggacgttttgatctccgggacaacgtctcacctcccagagtccttcagagtcactccaagatcatggaacaattttgtacacacagcagcacagggtagccccacccgccctgccgcggctccccagcctgcattttctgtttgaaaaacgtctatggtggatgccagagggtaggacaacctggaagagccaaggatggtcaaagcctctcccagccacgcggatgcctcatgcttaaaacacactgggcgcggtggctcatgcctgtaatcccagcactttgggaggccgaggtgggcggatcccgaggtcaggagtttgagagcggcctggccaatacggtgaaaccccgtctctactaaaaatacaacaattagccgggcgtagtggcacacgcctgtagtctcagctactcgggaggctgaggcaggagaatcgcttgaaccggggaggcagaggttgcggtgagctgaaatcatgcagctgcactccagcctgggtaacaagaatgaaactccatctcaaaaaaagaaaaaaaaaaaaaatccaaaaacatgatgggccgggccggtgacggcttccctggggcaagtcccgaaaacccatttctggcacagaggggaccctgcagaaaggacccatggctaacatcatgcaggggagtcacacttggcaacttttcatagacgaagccccctccagacccccacactccatcgtgcattcattgcaggatcgtgcagtttagcgacgggttcaaccatcacaatccgagtttagccgtatggagtaacaattttttaaataaagagatatttccaaaaaacttcatgatgtcacctcccgccccccatctcaattttacctctacttaaaaacaacacaaagcattccagtgaccctatgaagtctttttaccaatggccaattctcccggaactattgccaccgggcgaagtcacctccctttccccctcggcgccggtccacaattgaaacggcaatcgagagttttaaaaaattgttaccccatcgctgggggatttcagttattccgaacgggaagtggccgtaaagcctccatcccttttggcccaaactgagagggccatggggtcggacctgaaaattcatctccacctacaaggtccattctaccccatccgggcggtgggaacgccttttttggcggggagaggggggatttcttttggaattaaaggttttggggacttgagatgttttgtttgagctaattactgaatgatgccctgcctgagacagagacagagacagagagagagagagagaaagagagagagagagagagaacatatgagaacacagttataaaataatacaaggtttcttgtccttaaaggggttctccgaggcagggactccgaccagcagggggtcgttccgggcatgttgctcacagtagctcatgaggtcagacgccgctttggagacctgtgtttgagcacaaggaggagacagaggagacataagaagaggctggcacacccgggttcacagcagcaccattcccaagagccacaggcggaaacagctcaggagcccattgatgggggcgtgggcaaacagtgcggcccgtccacacgctggaatattactcagccatgaaaaggagtgaggctctgacataggccacaacgtggatgcatctcaagggcctcatgctcagtgagagatgccagacacagaaggccacacagtgtgtgatcccatttctttcttttttttttttgagacagagactctatttgtcgcccaggctctagtgcagtggcacgatctcggctcactgcaacctccacctcgcgggttcaagtgattctcctgcctcagcctcccgagtagctgggattaccttcatgcaccaccacacccagctaatttttgtatttttagtagagacagggtttcaccatgttgatcaggctggtctcgaactcctgacctcgcgatatgcctgcctcagcctcccacagtgctgggattacaggtgtgagccactgcgcccggccgtgtgatcccatttctatgaaatgtccaggacaggcctatccacagagacaggaaggggatgcgtgggtgccggtgctggggagtgatggctgatgggggacagggtttccttttggggtgatggaatgtcctggaataaacgtgattggatgcacagcattgtgactatattaaatatcactagtggtaaactttatatgtgtcttggccaggtgcggtggctcacacctgtaatcccaacatgttgggaggcggaggcgggaggatcacttgagcccaggagtttgagaccagcctaggcaacacagtgaggccctatctctacaaaaaatacaaaaatgagccaggcatagtgatgtgggcatctgtagtcccagctaactggggggctgaggctggaggattgcttgagcctgggaggttaaggctgcagtgagtcaagattacaccattgcactccagcctgggggatggagcaagaccctgtctcaattaagataaataaacaaataaataaatttatgtgtgtcttttcccaaaattaaaaaaagaaaaatgcagtggtgtgatcactgcaatctcttgctccccgggttcaagcaattctcctgcctcagcctcctgagtagctgggactacaggtgcctgccaccacgcccagctaatttttgtatttttagtagagacgggtttcagcatgttggccaggctggtctcaaactcctaacttcaagtgatccacctgccttagcctcccaaagtgctgggattacaggcgtgagccacggcacctggcctaaaaaatatttttttaaaaaagaaaaggctgagcttccttcagcaagcgttgccagattttgaacacaaagggtcagggacagatggaccccgttttcggagtccaagacctcattctcaccccaaggaaggaaggtcctgataggaaaacgctgcctgcacatttgatgagcttgagggaggtttcacggtgacacccggccagggggctgggcccggtgaggacgagataagcccgtctccatgtttctcttgcagcctgaaccccctgatgactccaaccctctgaggggctgatgcttccggtcacaggagggaccccctgccccgggctgctgccagcccgccccaggctacacgcccgtctctcctggccatgcctttgggggtgccgctgccactccccgcttagctcaccccagcagggctggggctggggtgtccggtgtcctgggtcaggctacacggggacacgtccatctggccctggatctcatcccgtaaccggtaactgtgtctctgtgggactcagcgacctttctctccttgctttctttcctggaaggcgagagggcgatcacagggggaggattagatgtggcagaggtgaggggatgatccgagaaggatcgcagtgtcgcttcacggaggtgcctttgttatctgtttttgagacagggtctcgctctgtcccccaggctggaatgcagtggtgctatcatagctcaatgcagcctccacctcctgggctcaagtgattctcccgcctcagctgggagtacctgagtagctgggactacgggagtgagccactacacctggccataattttcatttttattatttatttatttttttgagacagagtctcactctgtcagccaggctggagtgcagtggcgtgatctcggctcactgcaacctccgccccctgggtccaagcaattctcccacctcagcctcccaagtggctgggactccaggcgcacgccaccacgccagggtaatttttgtatttttagtagagacggggtttcaccatgttggccaggctggtctcaatctcctgacctcaggtggcccgcccacctcagcctgccaaagtgctgggattacaggcatgagccaccgtgcctggcctggccataatttttagaataattttctggtacagatgaggtctcactatgttgctcaggctggtctcgaactcctaggctcaggcgaccctcccgcctagacctctgaaagtgctggggttacaggcatgagccgcctcgcctggccagtacctctgcatcccagatcctctgtcctcctttggaccccaaggatacctgggacctgggcccttcaaacggccaggagcctgtgggacagctttggggtcttgcccagctgggcagccgggggacgctcatgcccacagagtgagcccgccggctgcggcctgtgatgactcggacctggcctgctttctagacttctatttgggaagcggccctcctggacgacagaaatagcctccagaccccgaaaatagctggcattgtggctccagcacgtggcaccttggcaccaccccccatgcccactgcgctgggctggtgagccccaagatcgtcgccgttgaggttctgtggttctggtcgccgcgttggagctggggatgtaaaacctcaggcgggactgggagtggggacgggtcaaatcctggctccccccgaggcccgacattcaaaggggcggtgggggcccctcctcaacatcaaacagggcaggatgagtcaccgccctccgcccgggctgggggctggcacccactcgtaaaaggaaaaccacttcaaccagggctttctctcttttcagcccgaaggaatgctttgaatgctcaggtctgtcctcagcagtcagattgctggaacattcagacacctcgtgggaggcagacccctcccctactggttggatcccggccagcagcagcgtgatggggtctgggagggctcagagctgcgctggagggagactcaccggccgatcagaaccacctgtgccacctggccagcagggacgactctgtccgcctccccgctgggagcaaagcaagggccggtcaccccttcctaataaattcccgtggccaataatgacaagctggtgacaggtgctggagagctgagttctgagtggatacgtggggtgatggctgattttatgggtgcactagggcgggccatggtgccccagggtttggttaaatgtttttttgtttttgttttttttctgagatggagtctcaccctgtcgcttggggttggagggcagtggcgcaatctcagctcactgcaacctctgcctctcgggttcaagctattctcctgactcagtctcccaagtagctgggactataggagcctgccaccacgcctggctaatttttttgtaattttagtagagatggggtttcaccatattggccaggctggtctcgaactcctgaccttgtgatccgcccacctcagcctcccaaagtgctgcgattccaggcgtgagtcaccgtgcctggccagttaaatgtttttttagatgttgctgtgaaggttgtttttttcttgtttcttttttttttttttttttttttgagatagagtctcgctctgttccccaggctggagtgcaatggtgcgatctcggctcactgcaacctccacctcccaggttcaagtgattctcctgcctcagcctcccaaatagctgggattacaggcatgcaccaccatacccgggtaatcttttttttgtatttttaggagagacggggtttcaccatgttggccaggctggtctcgaacccctgacctcaggtgatctgcccacctcagcttcccaaagtgctggaattataagtgtgagtcaccgcgctcagcctgttttttattttgtagagatggggtcttgctatgttgttgcccaggctggaattgaacgcctgacctcaagtgatcctcctgcctcggcctcccaatgtgctgggattacagctgtgagccactgtgcctcacatgcaaaattttttttttttttttgatgtgattcacatttaaatccgtagacttcaagcacagcaggtgaccgtctgtaatgcagatgggcctcatctaatcagttgaagggcttaagagaaaaagcctggggtccttccaggaggagggaactctgcctccaggtggccttggggttccagctgcagcaccaactcttccctgggtctccagcctgctggcctacactgcagatttcagagcttgccttaaaataaatctcgacaaggcgcagcctcaagtgtgatccttgtaaaaaacttcaaacgggccaggcatggtggctcacgcctggaatcccaggactttgggaggccgaggcaggcggatcacctgaagttaggagttcaagaccagcctgggcaacatggcgaaacgccgtctctactaaaaatacaaaaaattagccaggcatggtggtgcatgcctgtaatcccagctatttgggaggttgaggcagaagaattgcttgaacccgggaggcagaggttgcagtgagccgagatcgcgccactgcactccagcctgggtgacagagcaagactccgtctcaaacaaacaaaacaaacaaatccttcaaacaacacagaagtgaaaagtagatacgacatgcagtctcctcccgcctgggactgtgtctctcagtttaatttgcatctgtcattgccaaggagctggacagatcaatgcagatgaggacgacaaagcgctctgtcacgatgaccgtctccacggggccccagtgtgtttacaaagcacgttacattgctgcacgaaggcaggagataggtgttagatcagctgcctctttctgccgaggaaatggaggctcagagaggttaagggagggcctcaaggtcacacagcaagagacacagttggggtgcaagcctctgccctcctgccgagcctcctgttcatcatttgcggggcccccaagggtctctcccctcctcttcctgatgcccgctgggctcaccttgatgcgctcaatcccggcttctatgcgtagctgttccaccagcttccgggcctgggctatgttgttagtggctgacattgtctgccatcagctctgggccccgttgttcagagagctgtgggggaagcagaggggtgtgggtcaaagttcaggtcaggcctctgggtggcagcaggggcgcccggccttggctcaaccttcccgactctaggcacggccactttgcctctgggtggggaccaggggcctccgtgtacaaagagctggcactcgtttaactctcagcatagagcctggcacgcggtcagccgtcacaatcctctgtgggagtttgcagaacgagagaatgaaagggcgaaggcaggctgggcgtggtggctcacgcctgtaatcccagcactttgggaggctgaggcaggtggatcatgaggtcaggagatcgagaccatcctggctaacacggtgaaacctcatcgttactaaaaaaaaaaaaaaaaatacaaaaattagccaggcatggtggtgggtgcctatagtcccagctactctggaggctgaggcaggagaatgacgtgaacccgggaggtggagcttgcagtgagccgagatggtgcccctgcactccagcctggacgacagagcaagactccgtctcaaaaaaaaaaataaagaaaaaataaagaaagggcaaaggcaataggccaggccctctggagaagggaggacccacgcaggctcccgggtggcctgcctcagtccatggcaggggttcttgccctccaggggacactgggtgatatctggggacatctgtggctgtggggggtgctcctggcatggagtgggttgggtggaggccagggacattgctcagctccctgcagtgccccggacggccccacgccagggaaggatccgaacgcgatatccatagtacccaggggagaccctgggtcagggcagggatcacagcagaacccctggtgactgtccccctccgtgtttttttttttttttttttgagacagagtcttgctctgttgcccaggctggagtgcagtggtgtgatctcggctcactgcaacctctgcctcccgggttcaagcgattctcctgcctcagcctcccgagtagctgggattacaggcacgtgccaccacacccggctaatttttgtatttttagtacagacagcgtttcaccatgttggccaggctggtcttgaactcctgacctcaggtgatccaccctcctcggcctctcaaagtgctgggatgacaggtgtgagcccggcctctcctccgtgtccttcatattgaaccagtcaggagcccatgctgttgcttcttgaattctcctggaaaaacccaggacctcaacagggcagacgatcacaggacgcagagtctcttgggagtccgtggaatccccagatctcatctggggatgactctgccctccatggagcactgggtgatgtctgggacatttgtggctgtcatgacttgggggtgctcctggcagggagtgggtggaggccacggatgctgctcagcaccctgcagtgcccaggacggccccgctccagggaacgatccagccccacgtgtcagtagtgtccagcctagagaaacctgcttcgtaggacccagtgagggggttggtgctgatgggggtggcaggggcaggggccaggttcaagagtcctgggcagccgcagtcccagccgggcgtctgtgagcagttaattaagccgcaccctgtctctgtcataactcatggcatcgctgtctgttttgcagagccaggcagccgcagagaagtcaaggcagattccagagttctcaaaaaatgcctacttagtgataagaaggaaaggactggccgggcgcggtggctcacgcctgtaatcccagcactttgggaggccgaggcgggcgggtcacaaggtcaggagatcaagaccatcctggctaacacggtgaaaccccgtctcccgggcgtggtggcgggtgcctgtagtcccagctactcgggaggctgaggcaggagaatggggtgaacccggaaggcggagcttgcagtgagcagagatcacgccactgcactccagcctgggggacagagtgagactctgtctcaaaaaaaaaaaaaaaaaaaaaaaaaaaagaaggaaaggaccatccatgcataccacaccgcaggggaatctccagggcctgggatgtgtagcatgcttctgtttgtgtaatgtgtttaagaggactttttttagacagagtctcgctctgttgcccaggctggagtgcagtggcatgatctcagctcactgcaagctccgcttctccagctccagcgatactctcacttctgcctcctgagtagctgggattacaggtgcatgtgccaccatgcctggctaatctttgtatttttggtagagacatggttttaccatgttggccaggctggtctcaaactcctggcctcaagtgatctgcctgtctcgacctcccaaagtgctgggattacaggcatgagccaccatgcccggcccaaggacgaaattttagaaatggagaacagattagcggctgccagggatcagggaggggcaggggctgggagggagataggtctctgtataaaagggcaacacagccaggcatggtggctcttgcctgtaataccagcactttgggaggctgagatgcgaggatcacttgagtccaggagtttgaggccagcctaggcaacatagcaagaccccctctctacaaaaaattagaaaattagctgggcatgggtagcgcactcctgtggtcccagctacttgggaggctgaggtgggaggatcacttgagcctgggaggttgaggccagactgggcaatttagtgagaccccatctctgaataaataataaaagggcaacacgaatgatccctgttagtgcctcaactacggtgatgaatccacaagcctacatgagtgataaactcacagagagcctcacacactcacacaccagcgggcacaatactgaatactgtggaacctgagtgaggctggtgggtgtgtgactgtctggctgcgatcctgcccatagctttaccaaatgttaccaccagggacggccggggaatgacacacagaattcctctacattctttgttagcactggctgtgactccacggcgatctcaataaaaggggcaattaaacaaaaaatccctttgacaccgcccagcctccttggtttccagcagacgtcccacccccactttttgggggcagagaaggcccaatctgtctgctctggaggcagagcccacgtgtggccgctcagagggctctgattccagagagcttcaaagcagccacaaaacatccaactcagggaaaaccgcccttggttgggcttaaaaatacctaaattactcagtgctaaaaatacgtgcacgcagagaacaaacgggctggccgcacctcctgttttccttggaaggccagggggtcctatttagcatccacagtcaggagtgtccacccagaccctgggcccctgctgccctgggcagccaccgcccgcaatttccatgtgagcatcaggtcctgagccgtgctggcttttctgttttgggcgaaattccctgcgagatgctgcctttgggctgggtaataacccaggcctgccaggaaggccagagaggactgcgctgtgtgtgtgtgtctatgtttatttgcatgtatgtcaatgatgcacatgtgactgtacacgtgtgtacacgtggtgtgcatgtcagtgtgcacatgtgtatgtgtgtgcacatgtgcatgtatgtgtaccttgcgtgtgcatgtatgtgtgtatgtgtatactggcattcatgagtgtgcatatatgcgtgtgtgcacacatatctgcatgtgtatgtgtacctgcatatgcatgggtgtgcacgtcagcatgcatatgagtgtgcatccttgcatgtgtgtacatgtgcatgtgtctatatgagtgcatgtacacatctacgtgtgtgcgtctgcatatgagtgtgtgcataggtgcatttgcatacgtgcatgtgtgtggacatgcatgccagtgtgcacgtgtgtatgtgcacgtgtgtggacacggcactgcatgtgcgtgtgcgcacacgtgtgtgggcatgcatgtcactatgggtgtgtgcatgcgtgttggcgtgtgtgtacgtcactgtaggtgcgtggatatgtgcgtgcgtgggtgtgtacatgtgtctgcatgtgtacatgcgtgtgcgtgtgtgtgcgcacgggagtgcatgtggatgcttgggctgagatgccgagactcagacacagattgcatcacccatgcagtcgcctccctaagtccccgtctcggtggtgtcaccagccggcactgactcaggagcagccatgcccccagcagaggactaagccaacagcagcagaactggccacgcactgagtcagccaggaacgcccctcccaactgcctccctgcagaggcgcacgggtgccgggcaccccgacctgaatgagcttgcctcggggcccgtggcccggggaagctgtgggaggggcgggagcaggcagctccgggggcagggccaggtggtcaaaggtgcacacagtccccacggctccctcctgacggtcgggctctgcctcggtgcacaggctcctgcaggcaggcaaggctccaggccaggctctccaaaaataaaactgaagagggacgccgcccggccccgcgctggcctcctagcaaaaggctcatagccacacccgagtctaagcccgcctcgtgcagaaaaatcccactcgcgcctgaaagtcaagaaggatgagggtacccccccactccaggacatagtggaaatctgtggtcgctcagggaagggtgaccagccccgaaacagagcagacctgagctgatcagacacgaggctccagtgcacagaagggctgaacaaaaccgcaggacaggagctggcagcaccggcagggagggaggtgggaccacagggacccccagggagcagccgccctctaaccccttgctccggcagttatcccgagggcaaaaaatgaaaagaaataaaaatctacatatagaaaggcgtttataattgcgttatgtgtaagagtgaaaagttagaatgaaagcaagtgctctgcctcttttttttttgagtcggagtctcgctctgtcgcccaggctgaagtgcggtggcgcgatctcagctcactgcaacctccgccttccgggttcaagcgattctcttgcctcagcctcccgagtggctgggattacaggtgcctgcctccacgccaatttttttttttttttttgagacagagtctggctctgtctccgaggctggagtgcagtggcgcgatcttggctcactgcaacctcctcctccagggttcacgccattctcctgcttcagcttcccaagtagctgagactacaggcgcccgccaccacgcctggctaattttttatatttttagtagatacggggtttcaccgtgttagccaggatggtctcgatctcctgatcttgtgatccgcctgcctcggcctcccagagtgctgggattaaaggcgtgagccactgcgcctggccaatttttgtatttttaatagagacggggtttccccatgttggccaggctggtctcaaacgcctgacctcaggtgatccacccgcctcgacctcccaaagtgctgggattacaggcgtgagccaccgcgcctggtctactattagtttataatataaacttatactatattatactatagtattatacatttattacatatttatatattttattatatatttgtttactcatatatttatatttatactcatatttatatttatgtcatttatcatgcatttattacatatttgaagattcattcactatatattcatatcagttttgtattactaatatatagttttagtatttagtatgtattatacacttattgcatacatattttatatttattcatcatttacataatttatacattattaattatatagtttgatttctattttgacatttacattgtttgctattgattttatatttgtatttataatatatttagattactattttatatctgtatatatgtattatatagttatagaatctgttataggtttattgaatattgtttatcttaactttttttttttgagagggagtctcgctctgtcgcccaggctggagtgcagtggcacaatctcggctcactgcaacctccacctcctgagttcatgccattctcctgcctcagcctcccgagtagctgggactacaggcgcgcgccaccacaccgggctaatttttgtatttttagtagagacggggtttcaccatgttggtcaggctggtctcaaactcctgacctagtgatccacccgcctcagcctcccaaagtgctgggattacaggcgtgagccactgctcccggccctatcttaactttttattttgaaacaattatggactcaggcagttgcaaacatagtccagggagccccacgcaccctctcccggtcccctccagggcgacgtcacctgtgactatgagacactatcagaaccgggaccctgaggtcagcccaatgctgtgtctcactcagacggcaccactcccaccggccctcatctgggggtgcagagggagttttggtgtcgcgcatccctccaggaagggggcctgggttcctgcctggaggcatcgcccctctggagctgtgcccccgccctcgaacctgtccccactgggaggaggagaggaggtgaggaggtgtggcctaaacgtttgctgagcagatggctgagcagacaaagacccaaaactgcgacaaaattgacagtggtgtcagtaaagagagacacagcctagggccccagtctgcaaaatgggctgaactccgaagttcctaaaatcctaaagagacctgatctacaccgggaagtttaactcactccagtacaggccctctccctctggctggatccttttctggggtggggctgtcctgggcactgcagggtgctgggcagcatccctggtctccacccactccttgccaggaaacccccccccccaccagtgcgcccacagtcatgaccagcacaaatgtccccagacttggacaggtgtcccctgggggaaaattttaggcctttatggaactcccttatcaggagaaatcctgcagctcagagtggttcccttaggcaaaacgcaaagagtttgaacccagctgactgaaggccccaaaaataaatggtactgaatgaaaatatgctaggcgtggtggctcatgcctgtaatcccagaactttgggaggttgaggcgggtgggtcatttgaggtcaggagttcaagaccagcctggccaacatggtgaaacccccacgtctgctaaaaatacaaaaaaatgagccaggcatggtagtgcgtgcctgtaattctagctactcaggaggctgaggcacaagaatcgcttgaacccaggaggtggaggttgcagtgagccaagatcgcgccactgcactccggcctgggtgacagagtgagaccctgtctaaaaaaaaaaaaaaaaaaaaaggcctggctcagtggctcacgcctgtaatcccagcactttgggaggccgaggcgggcagatcacgaggccaggagatacagaccatcctggctaacacggtgaaaccctgtctctactaaaaaaaaaaaaaaatacaaaaaaattagccgggcatggcggcgggcacctgtagtcccagctactcaggaggctgaggcaggagaatggtctcaaaaaaaaaaaaaaaagtaaatacaggggtgtttccaaaagggctttaattttattagcatcccagaatgctttgtgactaggagaggccccacagggcgggagtcttcccccagatgtgagccccgttgcatttgaagggagtgagaccacagctcccacagaggagggaactcgggaaggtggtaggccagaaatctgcccttgctctaccaagctgtgtggccttgggaaagtttccttccctctctgagccccagtgacctctgttggaattctcagagggacactctcatctctgcaccaggcctggcccccaggttcctgtgtgaggaaacaggggttccagagtctggcaggcaggaagaggaccctcttccagggacctgtggcaactgccaaatataaacacagctgctggaaagacaaggtggctggaacatcctgcacccagcgaatgtggaagggccggtttgcccggagctcttgagaaatctcactccccgtggacttgcaccctgtcgccactcccctgacctgccctgaggctggggtgcagcagggaattgcaacagccccccaccgccggccctggagagacctgggcagagctggaagctgatcagattaaaaatcagcatggatcggattcgggatagagccacaaactgggtgtcctgaaattacccatttttgtgttggtgggtttttttgtttgtttgtttgttttttggagatgatggctcactctgtcgcccaggctggagtgcagtggcaccaactcggctcactgcaacctccgcctcccaggttcaagcgattctcttgcctcagcctcccggagtagctgggattacaagcatgcgccaccacgcccggctaatttttgtatttttagtggagacagggttttgccatgttggccaggctggtctcgaactcctgacctcaggtgatccacctgcctgggcctcccaaagtgctgggatgacaggcgtgagccaccacgcccggcccatttttgtgttgttgaacttaaagcatgagcttgggcaaatcccttcttcttctgagccatagggtaaaggtgagaggagagtcttgtaagctccgtgatgagttccagaagtccagggtgaccagtcatgcttagatcatttccgtgtcatttatggactcgatgagagacaaaagggcctctggggactgtgagttgcatcagcctcttgctgaactgacagaacattcaggtttcagggagaggtgaggtcattgccagggatcttgttcaagggataagggctgacacctgctcctgaagagggaccacacggtgcctgcctggaaatggaaaatccgggctcgcactctggctctgctcctggtttttgggtcttggcttcctcagctggaagatgagagggctcctctcaaggctgaggatgggtccccatttgtcatcctgtggctccaagatcaagaggatctagaatatccatgacctccttctaaacgacttggactttgggttaaaaatctctcttggcagattttggcttgcacaatggtggattagcagctaaggacaaacccactctcttgctgaggtccactagaaaagctggacagggccgggtgcggcggctcacgcctgtgatcccagcactgtgggaggtcgaggcgggaggatcacttgaggtcgggagtttgagaccagcctggccaacatggtgaaaccccatctctgctaaaaatacaaaaattagctgggcatggtggcacgtgcctgtagtcccagctacttgggaggctgaggcacaagaatcacttaaacccgggaggcagtggttgcagtgagctgagattgtgccactgcactccagcctgggcgacagagagagaccctgtctcaaaaaaaagaaaaaaaagctggacagggctgggtgcggtggctcaagcctgtaatcccagcactttgggaggctgaggtgggaggatcacttgaagtcgggagtttgagaccagcctggccaacatggtgaaaccccgtctctattaaaatacaaaaattagctggacgtggtggcgggtgcctgtagtcccagctactcaggaggctgaggtacaacaatcacttaaacccgggaggcagaggttgcagtgagctgacgttgtgccactgcactccagcctgggtgacagagtgagaccctgtctcaaaaaagaaagaaaagctggacagaatgtcaaagcatctgctcaagggcctgcagggttattaagataatggagaatttccagccaggatttaggggaggatcgaaagagagcctgggtttggggtcactttttcctggggttgggagggtttgctgagaggccgagtgatatttctatcagcttcacgaggccaagggtacagaaattgaggtccagggtttcctgaggagagaaggcttggtaaattcccccttggtgtgaattgggacaacttaatattgcactgtaagagtaacggtcacagctgggcacagtggctcacgcctggaatcccagcactttgggagaccgaggcaggtggatgacctgaggtcgggagttcaagactagcctggtcaacatggtgaaaccccgtctctactaaaatacaaaaattagctgggcatgatggcgggttcttgtaatcccagctagtcaggagctgagatgagagaatcccttgaatccgggagacggtggttgcagtgaaccgagatcgtgccactgtattccagctttggcagctgagtgagattccgtctcaaaaaaaaaaaaaaaaaaaaaaaaaggagtaaagatcaagaggaagcagacaggtccttctagcaactacagcagagttttgaataatctcaatccctaatattggattaaggtgatgcgagattgctggtggccccaaatgcctggaagaagtaaacataaatcccctctggaggaaaataatacgatcccaggcctcagattatttctacatgcaaatccgcaatacaggccgggcgcggtggctcacgaggtcaggagatcaagaccatcctggctaacatggtgaaaccccgtctctactaaaaatacaaaaaattagccaggcttggtggcaggcacctgtagtcccagctactccggaggctgaggcaggagagtggcatgaacccgggaggtggagcttgcagtgaaccgagatcgtgccactgcactccagcctgggtaacagagcgagactccgtcccaaaaaaaaaaaaaaatgcacaatacaatatctggcatgcaagtaagacatacgaggagccaggaccacataaacaaaaatcagcagaaataaccagcactgccaggtgcggtggctcacgcctgtaatcccagcactttgggaggcctaggcaggcggatcatgaggtcaggagatcaagaccatcctggctgacacggtgaaaccccgtctctactaaaaacacaaaaaattagccgggcgccatggcaggcgcctctagtcccagctacttgggaggctgaagcaggagaatggcatgaacccgggaggcggagcttgcagtgagctgagatcacgccactgcactgcagcctgggcaaaagaacgagactccgtctcaaaaaaaaaaacaaaaaaaaaaacaaaaaccagcactacaaagagacccacagggtttccatatactgggaattgacagagactttaaattaattgtgttaattacgttcaaagagataaaaagatgagattggaattttcgctgcaaattggaacaatggggaaaaaaaggaaccagtggatatggagaaaatgacaatatctgaaaagtaagaattcaatggaagaaataaaaattagtgaactggaagacagaacagagaaaaatatccagaatgaagcaagacgacacaaagggaaagaaactacagaagaaagagcaaaagacatagaagatgcagtgacgtctaatatacgtgttattggaacaccagaaggaggagagagagaatgaagcaggaacaatctttgaagagataatgaccaataactttctaaaactgataaaaagacctcaagccacagatttcagaatccctagaacctcaggcaaaagaaatgtcctaaaaagtggcagagaaatggccaataagcacatgaaatggtgtctaatgattagtcatgaaggaaatatgaattaaagtcatcaagagagactgcctctcaaccactagagtggcaaaaatttaaaagactgacaacactaaatatttgggaggatgtagaagaactggaggcatcatccattactgacaggaatgtgaaatagtacaaccaccatggaaaatggcttagcagtttcttataaggctgaacacatacctcacctatgacccagcaattccactcctagggatttattcaagataaataaaaacatgtctccataaaaggacttgtacgagatgttcataagcttttactcataacagcaaaacctggaaacaacccaaatgcctgtcaacgagagaataaacaagccatggcatttcacacaatgaaatacggctgcacacaaaaaaagaataaactattgagagatcaagcaacgtgtatgattctcaaaaatataaatgtattctaaaaaaataaaagataatacattattcaatattaaatattagtatttaattaatattaatatattaaatattaatattaaatatttaaaaaataaatgcctctcaaaaataaaaaaagtaaagcaacagaagctggatattagaggtgcatattatataattccatttatataaagttcaagaataggcaaaactatggtgatagaaatgaaaacagaggttgctgcctctggccagggtgttggctagaaagggccatgaaataacttctagggtgatggcgatgttctctatgttggttgagctgttggtgtacacaggtgtacacatttgctaaaatccatcaaactgtatctttaagatctgttcatcttactgcatttgaattggactttgataaaatcagttaattacaaacaaaaatcaacaaacaaaagttgccagaggaaaaaacagcagcaattaggtggacccagtgaaaatatccttcaagaattagggggaaataagggcattttcagataaacaaaaccagactttctcaccaacagacttgccttttaaaaggtaaaactagagaaagataattccagatgaaaggtagaaaatgcaggaagaagtgaaaaacaacaaaaatgttgtagagaggaaagagcttgataagataattctaaaattccagtggaaagatcaacaggaagtgaaaaactctgcaaaagccttagaacaaacacacatgaatcatatcagccttcagctcagtcctcacctccaaccaacccacaacagaagatgttctatgcttctgccttcacatttttattatacgatttttattatataattttggtcacgggattccagtgataggagttataaatattatttcaggagtttactagtgacattaattgaattttgcaattctacacacacacaaaatgaagtcagcatctgaaaaaatatatatacatcctcatccgctgtgactggtccaatgtcagtgtgataagactcaatgccagctgtccccagagacttttcttcagtccagccagcccctccttggatgtccacttcagcagtgctctgcagcctcaggcagatccccgtgtactccaccagtggcctccgctccactccccactccctccatctcctaacagctagagtgcgcttctgaaaatgcagttgaatctgttcctcccctactcagaaaccaccagcagcttccaattccttacaaaatcaagtgcaaaaatcaaggcttattgttcaattcccactgctaggaattcttcccccagctccaatcccatcaaagaactgccttctctgatgcatggctccaggatcatctcctttctcaccctgtggcctcatgagctcagcattttccagattcggaaatcctggagggggccatgagggagatggctgtccctgggaaactaagacccagagaaggtagatggcttgcccagaagatatttattataagaaattggctcacataattatggaggctgagaagccataagatgtacaattggcaagctagagagacacgagaactgatagtttctgtctgaaagccagcaggcttgagacccaagagcagatgtttccactggagtccaaaggctggaaaaacctatctgtcagcttgaaggctgccaggcaggaggaattatctcttacttagcatttttgttctattgagggctttaactgattagatgaggcccccacattggggagggggaggaatatgctttacacagcctatggttcatttcatccagaaacattctcacagacacacagaataacatttaaacagatatctgtgcaccccatggaccagtcaagttaacacataaaattaacagttacaacaatcttggagccagtcattcagcccaccacatcattctctcatggccctctgtttcttttcttgtagtatttataatttgatatttgagttgtatgcctactggactgtcagcctcatgaggccaaagatctgggggctgggtgcagtggctcatgctggtagtcccagcactttgggaggctgaggcaggaggatcacttgagcccaagagttcgagaccagcctgggcaacatggcaaaaccttgactctacaaaaaaaaaaaaaaaatacaaaaaactagttgggtgtggtggtgcacacctgtagtcccagctactcaggaggctgaggtgggagaatcgcttgagcccaggaagtggaggttgcagtgagccgagatcatgccactgcactccagcctgggtgacagagtaagaccttgtctcaaaaaaaaaaaaaaagatctgaattgttgtccccagaacctggtatataaatgttcaagagacatttgcttggggcctgaagcgggggctatgcctgtctttgcagatgtcgaccttaaccctggaagatctctttcccctgtgacatattccttctttatgatgcgggcttcaaatgttatttctttttggaacacatgttttttaatggcttctagcaccaggtgaccttgactcggaattcctagaacacggtacactcggaaagtcatatgggctgtttgttgcagactaaatatttgtgtcctcctctgaccccatcaagttcatatgttgaaatcctgggccaggtgtggtggctcatgcttggaattccagtgctttgggaggccaaggtgggagggtcacttgagcccaggagtttgaaaccagcccgagcaacagagtgaaaccccacctgtacaaaaataagaaaattaactgggtgtggtggtgtgtgcctatagtctcagctacttggatggctgaggcaggaggatcgcttgagtccaggagttggaggctgcggtgagttgtgaccacaccactgtacttcagccgggcaacagagtgagacatatctcaaaaagaaaagaaggccgggcgcggtggctcccacccgtaatcccagcactttgggaggccgaggtgggcggatcacgaggtcaggagtttgagaccagcctggccaacatgatgaaatcccgtctctactaaaaatacaaaaacagtagctgggtgtggtggcgggcgcctgtagtcccagctactcaggaggctgaggcaggagaattgcttgaacctgggaggcggcggttgcagtgagccgagattgcaccattgcactccagcctgggcaacaggagcgaaactccatctcaaaaaaaaaaagaaaagaaaagaaaagaaaagggcctcagcttgctgtttttgaaactgaagccacatgttttcttcctaatcagaactaaagtgaaagattaaaacaatcgatgttttgtttgtcttggagcaagaaatataagatctgtgtttctggcttgcagacaagagcactgccgcactgaagcgtgtgtgggtcgtatatgtgacagagcacaggaggcctgcagcgaggtcccgacagggaggactttcttgggccggagacctggttctgagcacgtcccctggacttccctgagcctcagctttctcggctgtaaagttcagaactagacagcggtttcccctgtgctccacgacaccctaggggttctgtgcagaggctgggccaccctgggttctcgggaggggctctcttggccttggggtacagtctgtgcttcctggtcggactccatttgtgtatgtgtatattttattatacagataataaaatatatatacatacatatttttatttttatttttattttttttttttgagacggagtctcgctctgtcgcccaggctggagtgcagtggtgtgatctctgctcactgcaagctccgcctcccgggttcacgccattctcctgcctcagcctcccgagtagctgggactacaggtgcccgccaccgcgcccggctaattttttgtattttgtttagtagagacggggtttcaccgtgttagccaggatggtctccatctcctgacctcgtgatccgcccgcctcggcctcccaaagtgctgggattacaagcatgagccaccgcgcccggccacatacatatttttagagccaggttctcactctgttgtccaggctggagtgcagtggtgcaatcatagctcactgcagcctccaactcccgggctcaagcgatcctcctgcctgggcctcctgagtagctgggactacaggtgcatgccactaggcctggctagttttttattttttgtagagatgaagtctctacagctatgttgcccaggctggtctcaagcgatcctcctgcctcagcctcccaaatcactggggctgcaagcgtgagccatggcacctggctataataaaataaatctgatatagaatatagaatagggtcataatatataaatgtaatcaacatataatacactgagcatgctcaaagtgtacggttctgatgggacaggaagctggaggcgggaaactggccctggagtgggggttgtggtgaagctggaggcgggaaactggccctggagtgggggttgtggtgttaggctgggacccggttacagtgactgcagggctgacaagaaattatgaaaggtcttgagggaagcgacacagaatttcaaaagaacataatgaatgcactttgggaggccgaggcaggcagatcacttgcggtcaggagttccagaccagcctggccaacacggtgaaaccccatctctaccaaaaaatacaaacatcagccggatgtggtggtgcatgcctgtagtcccagctactcaggaggctgaggtgggagaattgcttgaacctggaaggcggaggctgtagtgagctatgattgcgccactgccctccagcctggacaacagagcaagactctctctcaaacaaaacaaaacaaaacaaaacaaaacaacaatgaatggagaggagaaaagctgcagtggctacggaggccctgatgccatggatggtaaactggtatcttctgacgatgatgactttattgtaaaaagagaacatacacgagcatcaggaataaggaaagccgtgctgagtggcccaggtcagtctgctgagaatgaaaccgaccaggtcaattttagagagatccctccacgatgctatccaaagcatgcgtcaggccatcagcagtggtggtgactcatgcctgtgatcctaccactttgggaggccaaggctggaggatcatttgaggccaggagtttgagaccagcctgggcaacatagtgagacccccgtctctgcaaaaaaaaaaaaaaaaaaaaattagcctggcatggtggtgcacacctgtagttccagctacccgggaggctgaggcaggaagactgcttgagcccaggagttggaagctgaagtgagctatgattgcaccgctgcactccagcctgggcaacagagcaagaccctgtctttaaaaaaacacaatagaaaggcatgcatatattttacttacaaggttcactactctaacagctccactgagattcctgaattcctcactgcattggaagtgctgatggcttcagacttcctagatatatatatttttcttttttttctttttttttgagacggagtctcactctgtctcccaggctggagtgcagtggcgcaatctcagctcactgcaaactctgcgtcctgggttcaagccattctcctgcctcaacctcccgagtagctgggattacaggcgcccgccaccatgcccggctaatttttttttgtatttttagtagagacagggtttcaccgtgttagccaggatggtctcgatctcctgacctcatgatctgcccacctcggcctcccaaagtgctgggattacaggcgtgagccacggcacccagccctagattgttaaataaattataataaactgttaactaatttaggtatttaatacttgtagtttagttagtaatttttcatatattgcatgttcctgtaaacaaatgaactataaactgcgttgcaaagcagattatcttctgttttttccttgcatagtaatcagaattgaaatttgtttgtgacgacaataaattaaggatattttcacaaactgagaaataaacatatataccaactttttttttttttttggatggtgtttccctcttgtcacccaggctggagtacaaaggcgtgatctcggctcactgcaacctttgcttcctgattcaagcgattctcctgcctcagcctcccgagcagctgggattacaggtgtccgccaccacgcctggctaatttttgtatttttagtagagacggggtttcaccatgttggccaggctggtctcgaactcctgaactcaggtgatctgcccgcctcggcctcccaaagcgctgggattacaggcgggagacactgcgcccggccataagctcaattttagacacatacgatatccaatgggggatggacacacacctgacacggtcccagtggagccctgaatggacctctgtgctggaggctgggtgtcgtccctcccccagctgccctgtctcattggccaaagggtttagggagaacaacctagaggccttgctcatccagtggcctaaagttctgcattctaaatacacaccatcgcaggaactcacacctctcctttctccttcctgcctccctcccttcttctttctctctccctctccttccttccttcctccttccctccctccctctttctctttctttcttctctctccctctccttcctgccttccttccttcctccctccctccttctctctctctttccttccttttttctttcttctttctttctctttctctctggctctccctccctccctccctcccttccttccctcctccctccctctctctctctctctgtttctttctcaatttctttcttttcttttctccttccttccttccgtctctctctctctttctttctttttcttctctgagaaggggtcttactctgttgcccaggctagagtacagtagtgtgatcccacctcactgaaaacttgaactcctgggcctaagccgttctcctgccccagcctcccaagtagctgggaccacaggcacacaccaccatgcccccctaattttttaattttttgtagagatgggggtctcactatgttgtccaggctggttttgatctcctggcctccggtgatcctcctgcctcagcctcccaaagtgctgggattacagacggagcctccacactcggcctgtgctctaagactgattcttgccgggacccttagcccgacggcgtgcccagcctgtgcagagggtgggtgcgtgggcccctgctcgggggtgggtgggctgaatccaggtgtcctgggctgtaaagccaagaagcagacagcaggcctggggtggttggagattttgcggggaccctgggggcgctgaggctggagcatcccgagaagtccaaacctgcctggcctgtctctgccgagcagacagcgaggcccgccgggcagcgggacagactggcttccctcctcccggggagacctgccggagcaaacccagctccttttttaggtctgtgatgccacggccactcttggaggtgttttccagctgcacaggaagccgtgacagcgagacccagagaggctggcggtggctctgaattccaagcatagttctcatagttgggaaagtgccactcccggctcgataaaccgaccaggagccgccgccgccagggccatcttctcaccagcagggagagagcatgcagccggtggaggcttctgagagctggccggggcggcctgcgtaaaaggacaggaatgtcaagaatgcacccggcctggcagagacagggactttaccgagcggctcctgggcctggcggccagagaggcgagggagcgggagctaccgagggttcctccatcggcagggaaggtcctgagtcccccagaccctgttaaaagaggctgatcaggttgggtgcggtggctcgtgcctgtaatcccagcactttgggaggctgagtcaggagaattgcttgaggccaggagttcaaagccagcctggggcaacacagtgagaccctgtctctaaaataaaaaaataaaaataaatgttcttggggaagcgaagccgaatttcaggagaacataatgagggtgcagtgagctgggatggcaccactgcactccagcctgggcaatacagcgagaccctgcctctaagtaaaaaaatcaaggccgggggcagtggctcacgcctgtaatcccagcaggttgggaggccgaggtgggtggatcacgaggtcaggagttcgagaccagcctggccaagatggtgaaaccccgtctctactaaaaatacaaaaaacaaaaaaattagcctggcatggtggtgggcacctgtaatcccagctactcaggaggctgaggcaggagaatcgcttgaacctgggaggcggaggttgcagtgagccgagatcacgccactgcactctagcctgggcgacacagcaagactccatcaaaaaaaaaaaaaaaaattaaaaggtaagctgggtgtggtcgcacaagcctgtagtctcagctactccgggaggctgaggcgggaggatggcttgaggccaggagtttgaggttgcagtgagctagggtttcaccattgcactccagactgggggacaaagtgagactctgtctcaagaaaataaaaataaaataagaaaggctgatcagggccgagggctgagatgggaagaaatggtgcttctgtacccagtgctgctgggcctcctgtctggggctggctgcagggcggcccttccaaagagctccctgtggcaggtacacagtcgggccttggctaggctcatgggaggcagcgctgtgtgttctttttttttttttttttttttttttgagatggagtcttgctctgtcacccaggctggagtgcaatggcgtgatctcggctcaccgcaacctccgcctcccaggttcaagtgattctcctgcctcagcctcccgagtaactgcgattacaggcgctcacaaccacatccagctaacttttgtattttttagtcgagacggggtttcaccatgttgcccaggctggtcttgaactcctggcctcaagcaatccacccaccgcggcctcccaaagtgctgggattacaggtgcgagtcaccgcgcctggcctggggtgggttttttcatttgtgcactgaatgtttattactgacagccagcaaggaaagggggactgcgccctacgactgcaaggaagtgaattcaggaagaacctgaatgagctggggacgacaactggaagcttcgcgtcagacagcaggcggctcacgtttcagtttcagcctgggagaccctgggcagaggacgtcattgcaccatgacctccagaactgtaagctcaggcaggcgtgttgctctaagccaccacatatgcagtagtttcttatgcagtgtaaggagctgatacgcaaggccaggatgggactggttggggtctccaggctggagggccccccggtgagcaggcatggggtcccacagcccaggacagcttcagctcttatttgccatctgctgctgctaggtgttagacgctggactgagcatgctgcacacatcatctctgctgttttccttttttttttttttttttggtggtttttgttttgttttgttttgtttttgaggcagagtctcgctctgtcacccaggctggagtgcaatgacgccatctcggctccctgcaacctccgcctcccaggttcaagtgattctcctgcctcagtctcccgagtagctgggattacaggcatccaccaccacaccaggcttattttttatttttatttttttgtagagacagggtttcaccatgttggccaggctggtctcaaactcctgatctcaagtgatccacctgccttggcctcccaaagtcctgggattccatgtatgagacgccgtgcctggcctcctttttttttttttttttgacacagggtcttgctctgtcacccaggctggagtgcagtggtgcaatcacagctcactgcagccttgacctcctggcctccagagatcctcccacctcagccttctgagtagctgggactacaggtgtgcaccaccatgcccggctaatttttaatattttttcttttagagctggggcctcaccgtattgctcaggccagtctcaaactcctgggctcaagcaatccctctgcttcggcctcccaaagtgctaggatcccgggcatgaacccccgctcccggcctgcaatttttcttttcacagccctgagatgagggtgcagcattaaaacccgtgcagagggtggctgcttctccatgagccgagcaaaccgtcctcccatggctgcttcctgtaaaccggctcctaaggccagcgggcgtttgctctcctgacggcacaggaagtcaggctcagcgaattccagctcagagcgggctctggcggcttccaggcagctccacaatgaggcggctgcgcttttccagtctgctcatcaaagcagagccagccttgtgtggcgcggcgtgccggggtgagtcagccccgggggaaggtggccttgaaggcgggaggggcggccggcctgcagcagcaacgtgagaacagaagcaaccttcatctggctctaaaacttccagaaccagtagctttatagctcgcagagctcctggactctttcctcctgggggtctggcaatcccccacctctcacccctccaaacctctgcctgcctcgaaaaaggaaagaaaaataaaccccaagcaacaaaaccagcaaccagatttggcaggaggggagacaatgcttggagtggaaacgtcagcccttccccgtggagggatgactgcttctgagaacacagtgttcagagacaagagagacagggtgttatgtttagagaggaaaagatccaaacccaaacaaaatggaacagtagtttgggagagaagagaaggctccgaggcactgtgaggaacaagtcgccttcgtacagtggctggggcagctgggtttgcagagagctgtgtccctgggcacctgcgtcaatgtgcacatctgcacgcctgctgtgggcacgagggcctcagccatgagcacccccgggagccatgaggacctcagtgcatctcacagaagcccctgaggacagtgtgcagtggcgcgatctcggctcactgcaacctccgcctcccgggttcaggagattctcctgcctcagcctcctgagtagctggggttataggcgccccccacccccaccacgcccagctaatttttgcatttttagtagagatggggtttcaccatgttggccaggttggtctcaaactcctgacctcaggtgatctgcccaccttggcctctcaaagtgctgggattttaggcatgagccaccgtgctgggccaacagtggctcttaattgggggggtgggtgattcagccccgccaggaaaccctgggcgatgcctgagacatctgtggttgtcggggttgggggagctcctggcatggagtgggtggaggccaggggcgctgctcagcaaccgtaagtgcccagcacagcctcaccccagagaaggatcttaccccactgtccacagtgctgagggagaagaccctgagttaattatttggggaaaatggggttcaatccctacccacactagaataagctcccaacgggatggatggtgtgaaccagggggacccccaactcctgggattcacctcctctctccctcccagctcggtgtggatttcattgtgtgcagcctcctgggacctcagcacagcagaggatcatgggacgcagagtctcttgggggtccgtggaatcccctatccctgggggtttcacctagaggtaattccgtcccccaggggaccctgggcgctgtctggcgacatctgtggttgtcgtaactggggggtgctcctggcatggagtgggtggaggccagggatactgctcagcaccctgcagtgcccaggacaggcccacctcagagaacaatctggccgccatgtctacagtgcctaggggaccctggtttagactctgcagaaaggtgcacacataggccgggcacggtggcttatgcctgtatttccagcactttgggagaccgaggcgggcggatcacttgacgtcaggggttcgagaccagcctggtcaacatagtgaaaccccatctctactaaaaaaaaaatcaaaattagctgggcatggtagcgcatgcctgtaatcccagctactcaggaggctgaggcaggagaattgcctgaacctgggaggcagaggttgcagtgagccaagattgcgccactatactccagcctaagcaacaagagcgaaactgtcttaaaaaaaaaaaaaaaaaaaaaaggccaggtgcagtggctcatgcctgtaataccagcactttgggaggctgaggtgggtggatcacctgagatcaggagtttgagaccagcctggccaacacggtgaaaccccctctctactaaaaatacaaaaaaattagccgtgagtggtggtgggcacctgtaatgccactactcaggagtctgaggcaggagaattgcttgaacccgggaggtaaaggttgcggtgagccaaaatcgcgccactgcactccagcctgggcaacggagcgagactctgcctcaaaaacaaaacaaaacaaaacaaaacaaacaaacgaaaaagaaaggtgcacacagcttccagagcggacacagggcatcagggtgagaaggcacagggcaacgatcaggcgttgatgtgtcccctggcagctgggatgcaggccccccacggcctgccatgttctcaccaggacgccaaagaggggacccacgcagagcccggggagcccgactgaaatggaaacttcaatacaagagacaggtctgagactggccacacctgctgcccgctccacagaaccccagggccccctcagcaaccagggtctgcatgcagagaccctgcacccagcgtgggcacccaccctgcacctgcagcctctccagggccaggtcgcccagcagggcctgggagggcggctgtgtgtggggccttccgtgccagctctgaccgttggtggctctgtgacctcaaggcagggccgtggggcccagggctgcgggcgggagggcctctgccacatggaagggagggccgcactggctggaaaatagtgccttgtgactgtccctgtcagtgtgggccctttgctctcaggctaaatcggtccccggggcagctatatttagaaggggctaaagagagggaatgaatgaggtgcccacgagaaagtgaaaaatagaccagcggggcaggtcccgccgctgccttcagccggagcttggagcctaagaatgagccggcttgttcagacaaagaggccgcgacgacagagggtgacgcgccgccagtgtgggtttggtcgccgcggtgacgggagcaggagaaaagaaaagctgctctctgtccacccggcggtggggtcggcgggggcgggggatgaccacggtcatgtgagagtttgcaagcccgggaaccggggccgggccaggacactgaaccccgtggctcctgtcactccagttctgggcttcccggctgaggaaatgctgtcaccctggccccgggccagggcaaggggcagcgccggcctcgtgacggtggtgctcgggagctgaagggcaggagggttaggaagagaacagagggcagtaccgggccttcccacctcagcacaggtgggtctttctccacgcatgccccccccccagaaaactcctacacatcctgcaaagccccaccgatgtcatcccctctgagaagcccctgattgcaaccatctatgcacagccaggctgcactaaaaccccttctccgcacactggcagctccctggacgttcgttgtgtcctgtgacattgtggctgctgcacacgacccatgtttctcatctcacagctctgggctcagagtccaacatgggcctcactggtttaaaatcaaggcacaggcagggctggtccctcctggaggctccaggggagaatctctttcccgcctttcgcctagaggtgcccgtatccctcggctcgggacccttcctcccccttcacagacacagcacagcctcttcagtctctctctgactctcaccctcctgcctcctctcgtgaggatcctgtgaggtcactgcgcccccccaccccggatcatccacggtggtgctctcatgactcaggtggtccttcactcaatcccacctgcagagtccctttttccatgtgtggtgacacagccacagctcccagggattaggacatggatgtctttgaggcctttgttctgccaaccccagcacatcccagacactgggtaccaaagatgccacttggatggaaggggctggaggccatggtgcagggagttcacaaagggtgttacttcctggaacccactctgttcccagggccgatctccttcccaggacagaggctcccaggcccaggcagccctcggatgtgaagtgcctgccccacctccatccatagcaggtgctgctgctgtgcatgggcacacgtggcctggtaggcccacccctctgggctctgcagcaggggccggcccgtccgggcacacacatggccaaggatggacctcgagcctggggttctctgctgtggcccgtgggctccaggtcacatcatcagaatggctagaggtcaccagtatcatgtgtgacatctccagggccaccccactccagccctggtgttgttagaaagtcccggaaaactacaggcccagggagcttctccctgagggctagggatcattacggatgttttcatgttaacaatggaaaacaaaaatcaaaaaacaaaaaccaggtatggtggctcacgcctgtaatcccagcactttgggaggccgaggagggcggattgcctgagctcaggagttcgagaccagcctgggcaacgtggtgaaacctggtctctactaaaatacaaaagaaatttgctgggtgtggtggcgggcgcctgtaatcccagctactcgggaggctaaggcaggagaatgccgtgaactcgggaggcggaggttgcagtgggttgagatcgcgccattgcactccagcccgggcgacagagcgaggctctgtctggaaaaaaaaaaaaaaaaaaaaaacctagccaggcccagtggctcacacctgtaatcccagcactttgggtggctgaggtgtgtggctcacttgaggtcaggagttcgataccagcctggccaacgtggtgaaaccccatctctactaaaaatacaaaaattagccgggcctggtggcgctcgtctgaaattccagctactcgggaggctgaggcagaagaatcgcttgaacccacgtggcggaggtcgcagtgagccaagatcgtgccactacactccagcctgggtgcagagcgagactctgtctcaaaaaacaaaacacaacaaaacaaacaaacaaacagcgacaaccccctctcaagaataatctgaccctaatgtcagagatgctgatacccagagaccctggtcgaagggatgttccagccaggagcggctttctcgtgaactgtgcatgttgtttgcatcccgacaggttcaagtgacaaagctgggcaggctgaggccaccaaagggtttcctgggtccctgttcctgccacacaccttgaatcctcaatgccaaggcaactgcaaacccgagggaccccaggggggacactaggtctggacatgaaggtttggcagcaaactgtcaggacccccggagagaaccctgactcctgtgccaacccaactgtgtctggctcaacgctcgacgctcaaacacagcaaacggcaagaaggcaagtccaggatatacgttttggcaaaaatggcagccgtgggggtggaggtggaggaggacatgcacggagggcttaaacagggctgtgtttttttttttttcttttagatggagtctcactctgtcacccaggttggagtgcagtggcggatctcggctcactgcaaactccaccccctgggttcaagcaattctctgcctcagcctcctgagtagctgagattacaggcgcccgccaccgcacccggctaatttttgtatttttagtagagacggggtttcactatcttggccaggctggtcttgaactcctgaccttgtgatccacgtgtctcggcctcccaaagtgctgggatgacagacgtgagccaccgcactggccggggctgtgttttcatctggaggtttgcacggggccggggcattgtaaggctaagcatgggaatttcagtctctcccccagaaccttctggagagacaccactgcagctaccaccgctgcagctaccaggcaccagctgaccaggagggaggaaacacaaggctgctgtgtctggggtcagccagcaggccgggggtgagggcgggggtgacaggggagccagcacacttgttgtgcacaaagttccttgtgacagtgagttcgtcttggcctctgtcccaagatgaggttttgatgacacgcatggaatttctaacaatgaaatggagtgtgtggttttgctcacgcttacatccccttttcttgtctatccaaattccattacgccttttcttgctaatgcagaaacacggccaaatcctgggctgccccaggaagtgccgaggcctctttccgctctcagtggaaaagggaaatgtggctgccttgggtctggggtgccctgattctcagaatccctgtgggatggggaaagagtgtttgggttgagactggctcacaggaagtgggtagaatgcagcagaaggagcggctgggaggcactctctcatccagcccccgtggcgaccctccttgctggcttattttgagacggagtcttgctctgtcgccgaggctggagtgcagtggcgcaatctcggctcactgcaacctccgcctcccgggttcaagcgattctcctgcctcagcctcctgagtagctggtagctgggattacaggcatccaacaccaagcccggctaatttttttattttttggtagagtcgcggtttcaccatgttgttcaggctggccttgaactcctgacctcaagtgatctccgcccacctcagcctcccaaagtgctgcgattacaggcaggagccaccgctcccggccacctctgctcacctcctcaccaagccccagcttctgtgactgtcccccagggagagtgaccatggccctgctgggctctgaggggcttgtgcagatgagcaggtggcctacacagcctgagggaccaccagctgctctgtggcaagtctcgtgactccaatcccgctctgcctctggccagcccccgggccttgccacatcttttggttgccgagcctcagtttccccacctataaaatggggacaatgagccctgctccccagggatcctaggagaactaaaggaattggagcagtggacctggcctgcagggggcacgggagaggtatctgctgagtcgctgagtagggggagctgaggatcagggaggcgtcagtggtggggatggcccggctgctgggaacagggccaggggacttagccagggcccgacgagagctgcctgatgtcattgctggagcctcttgtcatccctcccagcagatgctgcagcatagggacctaatccccacggcacgtggccacatggctggcagcttgagcttgcggcctggagacacctgagccttgcccaggcagctccgtgccacctgccgtccagccacgctgccatcagccagcacttgtgtgtcccagaggacggggctcagggcaggctccagggacctcaccctggccgtttgacctccagcaaaggaggtctggtctcccggtcagaaaacaggagagagggcagggacttctccatggagaatatattcatggagaaggacgtaaaaggatccagaccagacaccacgggcacatgcgacccctcggccatcggccaggttttaaatcatcactgtcttcgtcgtcatcctgagtgtcatttgtgtgggggccgggactagggtgaggccatgcggcactcaccttgggggcaaaatctagggaacgccaaaaagccctgccgtgctggtaaattatattttcatacaatcttttattatttatataaaaatatatttatatgtatttattaatatatatttatctattatctataatatataaatatgcatttataaatatataaacaaatatatatttataaatatataaaaacacatatacatatttataaataaaatatatatttaaaaaatatatatatatacacacacatattttgagacagagtctcgctctggcccccaggctggagtgcaacggcacgatctcagctcactgcaacctctgcctcccgggctcaagtgagttttctgcctcagcctcccaagtagctgggattacaggcatgcgtcaccacgcccggctaattttttttattttcagtagagatggggttttgccatgttggccagtctggtctcgagcttctgacctcaggcgatccacccaccttgacctcccaaagtgctgggattacaggcgtgagccacggcgcctgactgcttgtgtgttcacagctgccccccaacgcttgcattcccgcctgagctccgcctcctgtcccatcagcagtggcatcagattctcatagaagcgtgaacccaattgtgaactgtgcatgtaagggatcttggttgcacgctccttatgagaatctaatgcctaatggcctcgactggccaacatgataaaaccccatctctactaaaaaatacaaaaaatcagccggaaattgcttgaacccaggaggcggagtttgcagtaagctaagatcatgccactgcactccagactgggcaacagagagagactctgtctcaaaacaagcaaacagaaataatctaatgcctgatgatctgtcactgtctcccatcacctccagatgggaccatctagtttttatttgtttgtttgttattgagacagagtctcgctctgttgccgaggctggagtacaatggtgcgatctcggctcactacaacctccgcctcccgggttcaagcgattctcctacctcagcctcccaagtagctgggactacaggtgcccaccaccacgcctggctaatttttgtatttttagtagagatgaggtttcatcttgttggtcaggctagtctcgaactcctgacctcaagtgatccacccgcctcagcctcccaaaatgctggggttataggcgtgagccaccacacccagcccagggaccatctagttgcaggaaacaagctccgggctcccagtgatcccacattatggtgagttgtggaattattttattatatattacaatgtcataataacagaaacaaagtgcacaaaaaaagtaatgcgtttgaatcgtccccaaaccatcctcccggctccaccccccccacctccccactgtctgtggaaaaactgtcttccacgaatccactccctggggccaaaaaggttgaggactgctgccttaaggaaccagaaaaggaagaacgaaggcagccccaagccagcaggaggaaggaaattgtaaagatcagagcagcgataaacgagacagagatgagaaaaactggcgagtcgacgaaaccaaaagttggttctttgaaaagagctaggtgattgacaaacctctagcggggctgaccaaaagcaaaaccaaaaaaaaaaaaaaaaagaggaaataagatgcagataactacacgcagaaacgaaaggaggacattactaccaactgtatggaaataaaaggcattatcagagaacacggtagcattatgaaccagtgtgtgacatccaattaggtaatctacacgaaatggacaaattcctagaaaaacgcgaatgaaacagatcagcgatggtttcaggttcagctcacatctcttagatactgacatgccagcatggtgctgagcatatatatatatacatatatatatgtaatatacattttatatgcaatatatatgttatatattatatgcaatatattatgttatatattatatactatatattatattttatatgtacatctcattacatatatgtacacattacatgtaacatcacattacatatatgtaatatcacatgtaataaatcatatcacatacacgcacatattacatgcaatatatcatactacatacatgcacacgttacatgtaatatgttatattacatacatgcacacgttacatgtaatatgttatattacacacatgtgcacattacatataatatattacatatatgtacatattacatgcaatatattacatatatgcacatattgcatgtaatgttatatcacacacatgtacgtatcatgtgtaatatatcacatacatgtacatattatatgtaatattgcatacatgtacatattatatgtaacattgcatacatgtacatattctatgtaatattacatacatgtgcatattgcatgtaatatattgtatgtaatatattatatgtaatatatattacacatatgtatatattatatgtaatatatattacacatatgtatatattatatgtatatatgtatacacagtggcgtgcacctatagtcccagctactcaggaggctgaggcaaagggattgcttgaacccaggagttcaagattgcagtgagctatgatataatagtatattatagcagtgaactataatatattatatataatatataatatatatatttttttcttttctttagagacctggtctcactctgttgcccagcgtggagtcccatggtgcaatcacaatcacagctcacagtagcctccacctcctgggctcaagtgatccttctgcctcagcctcccaaaatgctaggatgacaggcacgtgccaccacactgggtatattttttaagagaccgggtctcactctgtcacctaggctggagtacagtggtgcaatcatagctcactgcaaccccgaactcctgggttcaagcaatcctcttgcctcagcctcctgagtagctgggactacaggcgcacgccactgtgtatacatatatataggtatatgtgtgtataaaatatatatgctatatatatatatatatttttttttttttgagacagagtctcactctgttgcccaggctggtgtacggtggcatgatcttagctcactgcaacctccatctcccaggttcaagcgattctcctgcctcagcttccagagtagctgggattacaggcacctgccaccatgccctgctaatttttgtacttttggtagagacggggtttcgctgtgttggtcagcctggtctcaaacacctgacctcaggtgacccacctgcctcagcctcccaaagtgctgggattacaggcgtgagccactgcacctggctatttttatatttttgtatctatatgcttgtttaatctttgcaaccttcctgcaaaacggagaacgtcatctccactgcagacagttgacgcgaacccacccaaacggggcagagctggtaaaaggggatctgggatttgaactcaggtttcctggctctgagcccggagcccttttatgggatgactcaacctcccaaagtgtcaggcacacataaaagactggggcttgtttgttcctttttctaaaaaacaagagattccaacctcatgaagtaagagaaaatgccacataccttttttagttttcccaggaatcacagcttgctgtacaccctgtttaaaaaaggagagagaaagagaaaagcatggttacatattttttacttacaaggaactcacagagctacctccagcttttatcggagaacgacgttgctgtccccaaaaatgaggcatgggaattcgaaagggccgtgccctccggagaaaacgggggcagaatccactttattctttaccaccgatccgtgcggagaagacctggatgcttctcttgctggacaacagggcaaattatcttccagaaacttgtgttattccatttcagaacaaggaagccccaaccccacagtcaaagtccagtccatcagacacaccagtgcaagaaaaacaaaatacccaggcacggcgccttcccatggaatacttcggtgtttttccatctctgatttctacttttatgtaagccacgtgccgggcaaagggagaggtggaaagtggaaactggggacaaaccaattaaccccgaatggaggaagtgacaggtatacggggggcaggaaggccgggggtctcatgtgagccgcccagggccaggaggtcaataggaaggaaagaacgtctccaggccccggtgattggtctccgggggtcggggcggttggggcctttggagctgcggttttccatggaacggaatcctctgttccaagccggaccctgcacagggccaggccccgtatccgtctccaatgcacagtgcacggatcgcgagggggggcccacggccgtctccaatgcacagtgcacggatcgcgaggggggcccacggggaccaccttccgtggtctttcctgactcccactaaggtctggagggagatccaggcagcgatctgccccctccagcttcgcggcagcctcctatttcgtggacaaggaggcccgaggcaggcaaaggcccctgccttgcggagcgtctacaccggccgaggtcatggggccgggacttgcgcacaatgaacccagatgccaggttctgtgtctcccggttaggccaccactgctctgctgctgagccggcagccccacttggagaagccaggagctgcaccactgtcagctctaggggaggccccgtcctgcctagcggggctcaccctgcagtgggcttgcccggcgaggtcagcagacgcccctgcaccgggcccaacccaggcccagcttcctgagctgctcgaggccgggctgggccgggttcacgtggccaaggctgtttccctcctgccctgaagggcccctgtggtctctgaagccggccaggcccctcttccgtcacaaacatttgctatttccacaaaccaatgggtttttttccaccgacacaaagaagagccacatggctgctgctcctgggctggagtccgggccacccacacacgacactttctcagcagccctgcgccccggggctgcattggaggccaaggaagctgaggtcggcgggaagcctcctcaccttgcagcccagctggggaggccgagtcccggctttcccagaggctcccgggtctcagctgcaggaaggcggtgactgaggtcaccttctcctaagccagggtctctcctcccacccagcaatacggacaccagcgccggattgttctccggggcgggagcatcctgggctctgcagggtggtgagctgcgtccctggcatccacctgctccgtgccaggagcaccccccagatgtgttggccacaaatgtccccagacactgccccgggtcccctggggggcagaatcactccgtgtgagatccctaacctcttagtgacctagagacatccaggggggctgcctcccctcccacctctacacacacacacgcacacacagacacacgcacactcacacacatatgcacgcacacagacacacgcacacacgtgcacacaggaatactcagacacacgcacacacgtacacacgtgtactgcacactcacgcacatgcacacaaagacacgcgcacacacgtacacacaagacacgtgcacacacatttgcatgcacacacagacacacatgcacacacagacgcacatgtgcacacacacgtgcacacacatttgcacacacagacacgtgcacacacagaggtgcacatacacgcacagacacacatgtgcacacagacacacacatgtgcacacacacagacacacacacacgtgcacgcacacatgcacgcaggagcgagcgcctccacccagccctgcatctgaagcaaggtcctgctagtaaacatgcacagactcaagaaacgaggggctgcaggacttttcctcctcctgcccaaaggcacctgcactcacaaaagactcagaggctccgcctggccgggtcagcgaatggagttgtagcaccgtttcaggaccgtgatagagaaagacgggaagttagacttctgacccatcacaaactctgagtcaaagtgcgatgtgcccaggccagcccggtgtgacctcagctcctgatccataaaatcaggacagtgaccgaggatgctggggccacctcacctgcagccccgggtcagcctcagaacccacaggactttgaccctgccccaggccatggtccttgaccagggaaccacagctccttattctgatggggtgactcggtgcatttctctctcaggcttactttttttctctttgagacagagtctcactctgtcgcccaggctggactgcagtagtgcgatctcggctcactgcaacctctgcctcctgggtacaagcgactctcctgcctcagcctctcaagtagctgggactacaggcacgggccaccaggcctgggtaattttttgtgtttttagtagagagggggtttcaccgtgttagccaggatggccttgatctcctgacctcgtgatccgcccacctcggcctccgaaagtgctgggattacaggcgtgagccaccgcgcccggcctctcaggcttacttttaggtggctggaaatactgcttttcatgtgcacactgtattattttcatcatccttgccacagatgggcaccgtgtttttttgtttttgtttttgttttttttttgagatagggtctgttacccaggctggagtgcaatggcgtgatcacagctcactgcagcctcaacctcctgggctcaagcgatcctccctcctcagcctcctgagtagctgagactacagccacatgccaccacacccagctaatttttattcctgtagagatggggttttgccatgttgcccaggctggtctcaaactcctgggcccaagcgatcctcccaccttggcctcctaaagtgctggatgacaggtgtgtgccactgcacccggccagcaaaaatgggtttaaaggcagatgatcaaaccatgttgtagaacctcaatttttaaaaataagagagtgtgtgtagatgtctggggaaaggataaagtgctgggattgtggatgattttcctctccttatgtgattctcagattctgtaaaatgaagttatataactttctttcctcttctttctttctttctcttttctttcttccttcctttccttctctttctttcttttttctttctttcttctctctctttcctttttatttatttattattttttttgggacaggtgtcattttgtcacccaggatggagtgcaatggcgcgatctctgctcactgcaacctctgcctcctgggctcaagcaattctcctgcctcagactcccaagtagctggcattacaggcatgcaccaccactcttggctaatttttgtattttcagtagagacggggtttcaccaacatggccaggctggtctcaaactcctgacctcatgtgatccacccaccttggcccccccaaagtgctgggattataagcgtgagccatcgcgcccagccagttatattcctttcatagtcacaaagaatatatatatatacacacacacacatatatatacatatacatatatatccacagttgattagattctcattatttgtggtagttctgttctgtgaagtcaccacaaaaactgagtttgcgaacacaaatcattactcctagagaacatttttgtaggggtagtttcctttgagtttcaggaaactttcctttatctgatcaatacatgacctgttctgtgtgtctttttttttttttttttggagacagggtctcgctctgttgcccaggctggagtgcaatggtgcaatctcagctcactgcagcctcagtctcctgggctcaagtgattctactgccttggcctccagagtagctgggattacaggcacccaccaccatgtccggctaatttttttttctctcaagatggagtttggctcttgttgcccaggctggagtacaatggtggatgtcggctcactgcaacctccgcctcctgggttcaagcgattctcctgcctcagcctcccgagtagctgggattacaggcatgcaccgccatgcccagctaattttgcatttttagtagagacagggtttctccatgttggtcagactggtctcgatctcttgacctcgtgatccgcctgcctcagcctcccaaagtgctgggattacaggcgtgagccaccgtgcctggctcaaaggtgtcttcttgaatgcctatcgatgatgtgagtgttgaatagggcagctgctctctcagtcctgcctgagcaaagcttttctcacctaccagttcctccacgaggccctgagggacacgagaaggggcctcagcacgatgcctggggccactgcaaacagcaaaatcaccaaaaagagcacaaaaacgcaaaccccgaggctctcgctagacagtaatgagggcgtggtccacctaggaggggaaacggggaggcggagcgtggcctgggctcagggaacgcacgtccatgactctaatttcttgtctctctctgcgtgtccaaggataagagggaaagtaccccaggcattgatttggggttcacaaatacacaccaagccggcgaattcgcaaatacggactccgtgaatgacaaaggggactacagtacaaacccagcctgtccctcgcgcccctagtgtgctgagggcctggccgtggcaggaaggaagggaccgcctcagaccccacatcaccccatcccccaggtctgtctcccaccggcccccagggtcgattctcaggagaggaggtccgacctgctttagggggcccaagcaggaccccttacctccacatcttatttctgtgtcccacccagcccttcccttgaggcagtgattctcacctgggagtggccctgctcccaggggaccctgggcggtggctggggacattgtggttatccagacttgggggtgctcctggcatggggtaggcggacgctgcggtgcccaggacggccctgctccagagaaggatccagccccgatgtccacagggcctggggggaccctgaattcattatttggaaaaaagctgggcgcggtggctcacgcctgtcatcccagcactttgggaggccgaggtgggtggatcacttgatgtcaggagttcgagaccagcctgaccaacatgggtagaccccgtctctactaaaaatacaaaaattagccaggcgtggtggtgggtgcctgtaatcccaggtactcaggaggctgaggcaggagaactgcctgaacctgggaggcggatgttgcagtgagccgagatcgtaccattgcactccagcctgggcgacagaaggagactgtttcaaaaaaaaaaaaaaaaaaattatttgggaaaacagttgaatgcaatttctgctcacagtaggcatcagaataagctcccgatggggcagacggtgtgtaaaccagagggatcccagctcctgggactcacctcctctctccctcccccattcaaggtgtggattgcaatgtgtgcagcctcctgggacctcagcagggcagaggatcatgggacgcagagtctcttgggggtccgtggaatcccataacccaggggggctcaaccaggatgattctgctcccaggggatgctgggccatgtctggggacatctgtggctgtcacgactgggggtgctcctggaatggagtgggtggaggccagggacgctgttcagcaccctgcagtgcccaggttggcccaaccccagagaatgacccaggccccaatatccacggtgccctggggagaccctggttaggtcctgtcacagttttggtgtcagcaccactgcccttctgtgcccaggaggggccctgtcctccccttgtcccttcctctctgcaccctggcctgggtctttgaccctcccagctcttagcactcttggacacacaatccccacaagagcctctctcagaaagatagaaatgacactggttggccgggcgcagtggctcattcctgtaatcccagcactttgggaggccgaggcgggtggatcacctgaagtaggagttcaagaccagtctgcccaacatggtgaaactccgtctctactaaaaaaaaaaaaaaaaattagctgggcatagcggcaggcgcctgtgatcccagctactcgggaggctgaggcaggagaatcgcttgaacctgggaggcagaggttgcagtgagccgagattgcaccattgcactccagcctgggtgacaagagcaaaactctgtctaaaaaaaaagaaatgacactggcttctttctcttctttgcactctgaaaagcacctgagagcaaagtgcccagcagaggcagctgccccggggcgacccgagaaacaggaaaccctgtttctgagcttcgcaggctcttctgggagaccagcgggtaatccccttcctccgacatttctctgagaagtctctctgcgttctgcttctcagaaagaaaccagggtccggggcaggcattcacgccctccacccactcaggggtttgcagtaacacccttgggatctgcaggttcacacagagccagagccgtgagtcaccgcagccccggagctgccggggtccccacctgctcagccccaggaacacacatctacagcgggttcctttttcttttctttctttttctttctttttttttttgagacagagtctggctctgtcgcccaggctggagtgcagtggcgcgatctcggctcactgcaacctccgcctcccaggttcaagtgattctcctgcctcagcctcccaaagtgccgggattacaggcgtgagccaccgcgccccgctccttttccttttcttttaaatgattaatactcatgatttctgttcagctgaaagctacactcactttcaatacctacaacagggtttttccccccgggcactgtggacactggggccagatccttctctggggtggggccatcctgggcactgcagggtgctgagcagtgtccctgacctccacacactccatgccagcagcaggtgcccccagacatttactgagtgtaccctggtcaggggggacaggatcgctcccagcgtacactggaatcttaggggattccacagacccccaagagactctgcgtccataatcctctgccctgctgagttcccagaaggctgcacacattgaaatccacactctgagtggggagggagagaggatgtgagtcccaggagctgcagtccctctggtttacaccatcggccccatcgggagtttattctggtgtccagtgtgagcaagggacagattcaatctttttctttttctttttttttgttttttgagacagagtctcgctctgtcgcccaggctggagtgcagtggcgtgatctcggctcactgcaagctcctcctcccgggttcacgccattctcctgcctcagcctcccaagtagctgggactacaggcgcccaccaccacgcccagctaattttttttttgtacttttagtaaagacggggtttcaccgtgttagccaggatggtctcgatctcctgacctcgcgatccacctgcctcagcctcccaaagtgctgggattacaggtgtgagccactgcgtccggcccagtatttttcaaataatgaacacaggtctctcccgttctgtactctggacattgggcctggatcattctctggggtggggccgtcctcggcactgtaggctgctgagcagcgtccctggcctccacccactccatgctgggagcaccccgtagtcgtgactaccagaaatgtccccacattctactcaggatcctaagagaaccactcccaagcattattgaggtcacacttttttttgtttttgttttgagataggtttcatttctgtcgcccaggctggagtgcagtggcacgatcttggctcactgcaacctctgactcccgggttcaagtgattctcctgcctcagcctccctatagtagttggaactacgggtgtgcaccaccacgcctggctaattttggaatttttagtagagatggggtttcgccatgttgcccaggctggtcttgaactcctgacctcaagtgatctgcccacctcggcctcccaaagtgctgggataataggcatgagccaccgcgcccggcccaggtcacacctttgaacacttcagtgggctcattttatgtgtgaatttttagcctaattgtgaactgttgagttatttaaaccttcgcacccaaacttccttggtccagagaggatttgaagctcatacataaacaacacagcagcattgcaaatcaaggaatggaggagacggtgaaggtggtatttgggggtgttgggtggggtgggagaaacagcagggaaaaatcaaaggatggttagccaatgagaatggtgttcgtgtgtgtaagggcaggctcctaaacaggagtgtagctaattttcaactcaagaaaaagaatgtgtattgaatgcagtgggttgaatagtgtcccgcaaaagctcacgtcctcctggaagcttggcacgtaaccttctcagagatggggtctctgcagatggaagatgatacggatcttgggatgaaatcatcatcctgtttgtagggtgggccctaaatccaatgactggtgtccttttaagaaggagagacacaggctgagattggtggctcacacctgtaaacccagaactttgggaggccgaggcgggaggatcgcttgaggccaggagttcgagaccagcctggccaacgtggtgaaaccccatctctaccaaaaatacaaaaattagccaggcatggtggcgtgcacctgtaccactcgggaggcggaggcacgagaattgcttgaacccaagaggcggaggttgcaatgagccaagatggtgccaccgcactccagcctgggtgacagagcaagactctgtctcaaaacagacaaacaaacaccaagaaggagagatttagagatgcagaggagaggacatggctgtgtggagatggaggcagagactggggtgacacggccacaagccagactcctagagcccccagaagctgggagaggccggaaggaccctgcccctggagtctctggagggagcctagccctgcagacaccttgatctcagacttctggcctccaaaagtaggagaggagactgtcacaaaatgtctgttatttaaagccccgcaatctgtaataatttgcatggcactctaggaaatgaatacattggtcatttaaaaaaaaaaaaaagaatcaggccagatgcggtggctcatgcctgcaatcccagcactctgggaggctgaggcaggaggaccacttgagactaggaggttgagaccactctggtcaacacagtgagaccctgtcttgaaatggaatgaaatgaaataaatacaataaaatatccgctaagcttctgtgtctccctgtagccatgacaacagaagaccctgaggtggagaagatgacgccttcctgttggaatcacgggctcagactacatggggaaaacggaaaacacacgtgcaaccctcacacaacgtgtgcaccctgcaggctcaaaaaccaaagctgtgccaggcgcggtggctcacacctgtcatcccagcactttgggaggccgaggcgggtggatcatgaggtcaggagatcgagaccagcctggccaacatggtgaaaccccgtctctactaaaaaaatacaaaaattagctggacgtggtggcacacgcctgtaattccagctactcaggagactgaggcaagagaatcacttgaacccgagaggcggaggttgcagtgagccgagatcgtgccattgcactccagcctgggcaatagagagagactctgtctcaaaaaaaaaaaaacaaaaacaaaagctgtttgcgtcaaaggaagggtcggttagttccttccctccaggactgaatccatgagaactgcagaaatttaggattaggaaccagttcgcccagggttcctaaaacctgcaatcactgggagaggcccatcccacccggaagaacctgattgagtggtctggggtgtgccgggcacagggcagttgagactccaggtgacagttaccggcagctcagggtggaggctgtgtgagcccggccgagtcctacaggaagcgtctgcagagtgtaatgtgctcagcgcttctgcaggggacgggcggaatgatgtgtgcagacattttaaaccatggtagaggccgggcacggtggctcacgcctgttatcccagcacttcgggaggccagggcaggcggatcatctgaggttaggagttcgagaccagcctggccaacatggtgaaaccccgtctctactaaaaatacaaaaattagtcaggcgtggtggtgggcacctgtaatcccagctactcgggaggctgaggcaggagaatcgcttgaacctgggaggcggaggtggcagtgagccaaaatcgcaccactgcactccagcctgggcgacagagccagactccgtctcataaataaataaataaataaatataaaaaataaataaaggggacatttggacacagatgcacacgggagggagaatgctgtatagataggagattggggtgacaaggcagagattgggggtgtcacttccacaagccagggaaggccaaggatctccggccatcaccaggagctgggagtggccctgggatggattctccccactggcttcggaagaacccagccctgcctacaccttggccttggacttccggtctccagagcggagagagaatgaacccgtggtgtctaaacggctaggtctgtggaccttgtacgagcaccccatgaaactcacacaaagccctaaaaggcgtctcagcctggctccgggggaagggtccgagacagcagaccagaactggggccacagcaatggtcgggggacacctccttcccctcccacccccactgctaaaggactggctagaggttgtaaggccagggttggcaacattttcctgtaaaaggccagagagcaaacttctctggctttgtgggtcagatggtctctgttgcaactgctcgactcagccacagaggcaggagaggctgctgtggacgatttctcaatgagtgggcatggtgggtgccaataaaactttatttacaaaaacacactgtcgctgggcatggtggctcaagcctgtaatcccagcactttgggaggccgaggcaggcggatcatctgaggccaggagttcgagaccagcctgaccaacatggtgaaaccccgtgtctactaaaaatacaaaaaaattagccgggcgcggtggcgggcgtctgtaatcccagctactcgagaggctgaggcaggagaatcgcttgaatccgggaggcggagcttgcagtgagccgagatcgcgccactgcagtccacagtccggcctgggcgacagagcgagactccgtctcaaaaaaaaaaacaaaaaaaacaaaaaaaaaacaaaaaaaaaaacacaaaaacaataacaaaaaacccacactgtccatcatgggcccttgctggctgacctctgctctagaatctccttaatttcaagtcattgggttggccgtgatcattcctgtagtgatgcttccagaacacaccttttccatctgcaggtttatttcttctcagttgtcgtcgatttgtgtgtgtgtgtgtgtgtgacatagggtctcactctgtcacccaggctggagtgcccgtggtgcaatcacgctgcctcgacctcccaggctcaagcgacctccctgcctcagcctcctgagcagctgggactacaggtgcacactaccacaccagctaatttttgcatttttttgtatagatggggtttcgccattttgcccaggctggtcttgagctcctgagctcaagcgatcgtcccacctcggcctcccaaagtgctgggattgcaagcgtgagccgctgcactgggccggtgtcctctgtcgtatcctacttaggcactgcctctgacgcttctgtgctccagcggcagagctgagtgctggagccggagactgggccacagagccgaaaacagcaaccctctggccctttacaggaaaagctcgctgccttgtggtctaggatgagacctaaaaggtcacaagtctcctcttcagagcaccagactccgacgggggcagggcaatgtcaactgggcaacagggaagtcacccatctgttcccgggcaccacgcgctcaggcatggaagggagagaagggcgttgccattcagcaggaactcaggaagtagggcgttcacaacgccttcctggaaaatgcatctcaccaggcactccagccacccaaaaacagagacacgggcatgcaagcacacatgcacacacgtgcagatacacacacatatagacatacacacatatacacatgcacacacacacacttacacacatgcacatacacacatatagacatacacacatatacacatgcacacacatacacatacatacacacacatacacacatgcacatacacacacatatagacatacacatacagacatgcacacacgtgcacatacacacatatagacatacacacatatagagacacatatagacttacacacatatacacacgcacacacatacacacgcacacacacatatacacacatatagacatacatacacacacgtgcacatacacacatatagacacacatatacaacacaaacacacacacatatacacatagacatacacacatacatatacatacacacatacatatacatacacacacacatgcacatacacacagacttacgcacatacacagggtctctgtgtgtgcacatacacgtgcacatatacacacatacacatatatatacacacatatacacacatacacatgcacaaatacacacatatatagacatacacacatatatacacatacacacatatatacacatatacacaaatacacatatacacatacacatacacatatatacacatacacacatacataaaatatagacacacatatacacatacagacacatatacatacatacacacatacacacatacacatatacacataaatacacatacacacatatacacgcacatatatacacacacatatacacacaaatatatacacatatgcaaatacacacaaatatacacacaagtacacacacatactcatgtgcacacacatatccacactatacacatatacatacatatacaaatatacaaatacacacaaatatacgcatacagatctgtgcacaaaaacatacacatacacatatttacacacatatacacacaagcagacacatatacacaaaagcacaaacatatacacagaagcgcacacacatacacacaagcatgcaagcacacacacacatacacacaaatgcacacatgcatatacccacaggtgcgcgcacacacacacaactcagtgaagggagaggccccagcatgaggcacctgctggggatcagttccacaaagggtgcagcataactgctggagcaggaacagctacacagtggatggcgatcatctccattctctctctctctctctttcttttttttgtgagacagagtctcgctctgtcgcccaggctggagtgcagtggcgcgatctcggctcactgcaagctccgcctcctgggttgacaccattctcctgcctcagcctcccgagtagctgggactacaggcgcccgccaccacacccggctaattttttgtatttttagtagagacgagggttcaccgggttagccaggatggtctcgatctcctgacctcgggatccacccgcctcggcctcccaaagtgctgggattacaggcgtgagtcaccgcacctggccaatcatctccattcttaaacaaaaagtgtgagacatgacaattatgtcgctatcatactaaatagggtctctcttagcactgtggacactgtagccagaccgttctctggggtggagccatcctgggcactgcagggtgctgagcagcgtccctggcttccactcactccatgccaagagcatccccatcgggacaaccacagatgtccccagacatcacccgtcccccagtcatgacaaccacaaacgtcaccagacatctcccggtgtcccctgggagcaggatcagccccagctgagaaccaccacactagaacaactgcgacaaaaatagccacaaaatcctagaatccagcagcacaggactgagcaatgtcagtgacatggggccaatgtttgtgcctccggatctcacactgaaatgcgaccccctatgttggaggtgaggctgggtgggcggcatttgggttgtggcgggaggggggtccctcatggcttggtgctctcccctcgggaatgagcgagttcccactctgttagttcacggacgacctggttgttaaaaaaagcctggcacctcctccctcctttctctcgctccctctctggccgtatgagatgcccgttcccccttcaccttctgccatgagtggaaacttcctgaggcctcaccagaagcccaggagatgctggcaccatgcttgtatggtctgtagaactgtatggtctgtagaactgtgaaccagataaacttctatgctttataaacccctcagcctcagctctattcctttatagcaacacaaaacagactatgacagtcaggcacggggagacacgcagagcttgactgggcctcaggtcaggaaggaaacttccctttccagccacatgtggatggggcccgtgttcactggggaagtggcatctgcaaacctcagctcttccatctgtaaaatgggcatctccacacccacttagccgagaactcatgagagcaaaggagaagctaaatccctaaggacgcagccccataatgggccccaggaggagcttgagagagacagacagcccaggagccaagtctcagccatgaacagaaggtactggaaggttttccaggagcagacagcgctcctcggacagtggagagatggtaaaggacgtgaacccacaattcacacaaggaaacaaaaccccaagcctaaaaacagatgttcagcttggctttttaattttttgagacagggtcttgctctgtcacccaggctggagtacagtggtgcaatcacagctcactgcagccttgacctcctgagctcaaccgatcctcctgcctcagcctccccagtagctgggattacatgtgcacgccaccacgcctggctaatgtttgtattttttttttttagagatggggtctcactatgttgtccaggtgggtctcaaactcttagactcaagtgatccacccaccttggcctcccaaagtgctgagatgataggcgtgagccaccgtgcccggcggagttgtccagctttaacaaacaacaacacatgcaccaataacaggattccaccctggcctctcggactgtcaccgatggaagcctgacgacgcccagtgtcttctaggatctgcggaatgggggcctctccagcacagataacagagggtccctggtcaacatttttggaagaaaatgtggcggcattgtcggaaccgagaaggtgctacctgctgatgcgacaattccatacctacgaatttattgcaaagaccttgttggacacgtgggcaaagatgtctacctatatccttatccttgttctgattgcagaactgtgaatgcttccaaactggaaccatctcaatctgcctgcagaggcgtggttaggccacgttgcatttctaggatgggtagcgtgcaggggtggcttggagggtgcctgcaggctacgttaagtgaaagagttatcagatgtgtggtcacttttcttttcatttctttcctttttttttttttttttttttttttgagatggagtcttgctctgtcgcccaggctagagtgcagaggtgcggtctcggctcactgcaacctctgcctcccggggttaagtgatcctcctgcctcacccttctgagtagctgggattataggcgagtgccaccacgcctggctaatttttgtattttcagtagagacggggtttcaccatgttggccaggctggtctcgaactcctgacctcaggtgatctgcccaccttggcctcccaaagtgttgggattacaggtgtgagccactgcgcccggccagttgaccgttttatatgagtcatataaaatatgggctacctacctatcctgtcccattggcctatttgtctgttcttttgacaatgccacattgtccctctctctttgtgtttttgttgttttgttttgttttgtttttctttgagatggggtctcactgtgtccaccaggctggagtgcagtggtgtgatcatagctcactgcagcctccacctcccgagctcaagcgatcctcccagctcagcctgccgagtggctgggaccacaggggcacaccacaacaccaggctaattttttgttttttagagacagggtcttgctgtgttgcccaggctggtctttaactcctgggctcaagcaatcctcctgcctcagcttcccacgtatctgggactataggtgcatgccaccatgcttgcttaatttttttgttttttgtagagacgggtttcgctacgttgcctaggctggtcgagcaagtttttaattccttcacagagctgtgcaaccatcaacactacgtagttccaacactttttcttttcttttttttgagacggagtctcgctctgtcgccaggctggagtgcagtggcctgatctcggctcactgcaacctctgcctccccggttcaagcgattctcctgcctcagcctcctgagtagctgggactacaggtgtaagccaccgcgcccggccctttttttttttttttttaagagttaacgatctgttgcccaggccggactacagtggcacctccttatctcggtgaagccttgaattcctgggctcaagcgatcctcccatctcagcctcccgagtagctggggctgcagacatgaaccagcatgcacggctaacttaaaattcttttcttctagagatggggtctcactatattgcccaggctggtcttgaactcctggtctcaagcaatcctcccacctcggactcccaggttgctgagattacaggtgtgagccactgtgctggctgaattccagaactgtttcatcgccttaaatggaaaccccgtccgcattagcagtcacccccgtctcctccaaccacacatccatgcatattctctgtggatctgcctgttctggaaatttctcctttttttttttttttttttgttttgagacagagtcttgccccgtcgcctaggctggagtgcagtggtgcgatcatggctcactgcaacctccgtctcccaggttcaagcgattctcctgcctcagcctcctgagtagctgggattacaggcgccaccacacccggctaattttttgtatttttagtagcgacggggtttcaccatgctgcccaggctggtctcgaactcccaacctcaggtgatccgcccgcctcagcctcccaaagtgctgggattacaggcctgagcccccacgcctggcctggcttccttcatgaaataggtattgaggggaccacagttccgagcccactccccagccaagtttctgcactgatggaggaggcggggctagtcttagggaagcggctagaagacttaagatcttgtctgtaccctgtcccctcacagctgcgtggcttccgacaagctgcttctgcgctatctgtggagaacgatctaaaagtgggattggggctgggggtggtggctcacacctgtaatcccagcagtttcggaggccgaggcgggcagattacctgaggtcaggagttcgagaccagcctggtcaacatggtgaaagagttagtgtcttgttcacggcgaaaccccgtctcgactaaaaatacaaaaattagccaggcgtggtcgtgggcgcctgtaatcccagctactcgggaggctgaggcaggagaatcgcttgaacctgggaggcggaggtggcagtgagccgagatcacgccactgcactccagcctgggtgacagagcaagactccatcttaaaacaaaaacaaacaataaaagtgggattggcatttccctcccgtggtcatatgcgaacgggtgaattaaattctttctggaagaggctggaaaggcactgcatgaatgggacataccgtgggtgccacggaccagctgctgcgaggtacggccggagttctgccgcctcggggaggcctgggtatcccgagaccagagatgctgccttctcaccttgggtgcctgggtctggcccagagcccgtcacacctgggctggtgcagtccaggtgaaacccgccctgccagccacccccaccatctcccggggtgtccctgctgggcctgcattctgacatcacgccttcaaactcaacggtgaggccgcgggaacacgcatctcatatgacgctggagccggaagatggggcttggggctttcagcccttcctctccctctctcttttctcactacaatgttgtgccgccatcaccaccatcctctccagaactttctcctcttcccaaactgaaactctgtccccatgaaacactcactccctgtccccctccccagcccctggcactcactcatcctacttcctgtctctgtgaatctgacgactctagggacttcccaggagtgggatcacacaggatacgtccttttgtgtctggatcctctcactgagcgtgaggtcctcaaggttcatccacgctgtagcccgtgtctggattcccttccttttcatggctgcgtaatattccactgtctggttggaccatgctgtgtttatccactgatgggcgcctggggtggcttccaccctggggctgttgggaatcatgccgctgtgcacttgtgtgtgcaaacacctctttcagtccctgctgtcagttctgtggggtctatccccaggagtgggattgctgggccctatggtaattccgtgtttaccatgtgagaagctgccaggctgggccttgttccatccccaccagccacgcacgagggtctgtttctccatctcctctcccgctcttgtccgaaaccgcacttgttatcagagcctcagcgtcctgcctgttaaatgggctcgtggtttctccaaggctgctggcaggccctgtgaaaggctatcagctccagctgctgttaggcttaggggcacaatggttaactctgagctgtcagggaaccagggaagaaaggctggttggaatctctctttcttttttctttttctttcctttttttctttctttcttttttttttttttagatggggtcttgctctattgcccaggctggagtgcagtggcaccgtcatagcttactgcagcctggacctcctgggctcaagctatcctcccacctcagcctccagagtagctaggaccacaggtttgcaccagcctatccagctaatttttaaaatttttttgtagagacagggacttgctgttgccaggaactactgggttcaagcaatcctcctgcctcggcctctcaaagtgctgtgattacgggtgtgagccacagtgccctgctcgagtctttttgggcatcctttgggattgatctggaaagctccagggaagtgtacaaagcagaacgggcgcctcctcagggcgtgtggacacgcaggcacacgcaggcacatgcagacacgcaggcacacacagacatgcagacacacgcaggcacacgcagacaggcaggcacacgcagacacacgcaggcacacgcagacacgcaggcacacgcagacacgcaggcacacgcaggcacacacagacatgcaggcacacacaggcacacgcagacacgcaggcacacgcaggcacatgcagacacgcaggcacacgcagacacacgcagacaggcaggcacacgcagacacgcaggcacacgcacacgcaggcacacgcagacacgcaggcacacgcaggcacatgcagacacgcaggcacacacagacatgcagacacacgcaggcacacgcagacaggcaggcacacgcagacacgcaggcacacgcagacacaggcacacgcaggcacacgcagacacgcaggcacacgcaggcatacacagacacacaggcacatacagacacacaaaggcagacacatgcagacacaggcacatgcaggcagacacacacatgctcacactcaggtacacgcagacatgcagacacacacacagacacacacagacacatgctcacactcaggtacacgcagacatgcagacacacacacagacacacacagaaccagacacacagatgcatgcagacacacacagacacatgcggcacgggcacgtgctcccagagcaggagttgtgaggctggcaggctccaagactgagtttcccaacccaccgcagtggggcggcctcggatgacgtgcaggcgtgcagcccggacggccccaggggactgcagcaaaaacaaacatgccgggttgattccagcagaacccttcgacccaggcctgcacacggtgtgctgggaatccgccctgggtggggctgacccactccctcctagagttcaccgtggtccctggatgcttgctgaccccagggaggacagggcgggccgcggcaggcgggggacgggcactgcagcagctggtggccaccctcacacgtctgggaaaccaggaacccttgggaactaaacttggtcttttttattttattatgtatttatttatttatttatttaagaaacaggggtcttgcttcactgcccaggctgagtgcaggggtgcaatcacagctcaatgcagcctccacctcctgggctcaagcgatcctcccacctcagcctcctgagtagctgggactacaggtgcgtaccagcccatctgggtaatttttaaaacttttttttacagatggggtctccctgggttgcccaggctggtctcaaactcctgaacgcaagcgatcctgctgcctcagcctcctgagtagctaagattacaggagtgcagcatcaccctggctaatttttaaaatttgttctaaagacagggtctcgctatgtggcccaggctggtctcaaactcctgggctcaagtgatcctcccacctcagcctcccaaagtgccgggattacaggcgtgggcctctgtgcccggcctgaatttgctcttaagtcattcacgctacgtgagtcaccagggctgtcccgtgtgcaaagttccagtaagtctttgtattcctgttggcagggtcaggacaaggtccacctcgcaagctggggctgtggggcagtgagctcagtctctgtgttgcgtaaccaattgccatccatgtggcgccttccaacacacatccacttagtacgtcacggtttgtggggtcaggagtccgggaacagccaagccagggcctctgttcagggtacccccagggctgcagtctgggtgttggttggggctgcgtctcatccaaggctcgcccggggaaggctcttcatccagcattccctcaggctgttggcaccatttgcctccctgtggttgtaggaccggggtccctgtttccttgctggctgttgcctgggggacactcccagctcctatgggccacccttgggtcctagctatcagaccctcctcgggccttctcgcaatgcaccgctcacttcttcacaccaggaaccagcaggggagtgtcttcccacaactctgctaagctagagtcttctgggtgggcgtggtggctcacgcctgtaatcctagcactttgggaggctgaggcaggaaaattgctttaagccaggaggcggaggttgcagtgagccgagatcacgccactgcactccagcctgggtgacagagcaagattccatctcaaaaaaaaaaaaaaaaaaaaaatcagcgtaatattttacatattatatatgcatgtaagcatttgctacatatttatattgagaaataaatctaaaaagaaaatgtagaacatccctatataaaatgttatggtgttattttcctttttttttttttttgagatgaagtcttgctgtcacccaggctggaatgcaatggcgcaatcacagctcactgcagcctcaacctcccaggctccagatcctcccacctcagcccctcgagtagctgggaccacaggtgtgcaccaccacgcccggctaattcttttatttttttgtagagacggaggtctcgttgttgcccaggctggtcttgaactcttgggctcaagtgatcctcccaccttggcctcccaaagtgctgagattacaggcgtgagccaccgcgcccggctacgtgcttgtcttattcagcattatgacatcatagagggtgctgattcttaggggctttgagggtctctgagggctttgaggctcagagatctgctgagacacaggtagcgtaggcagagctgggacaaatcccccgttagagccgggggccctcggagaacccaatacgggacccagaggaccgagggcagcctagtgccaactcctgactcgccctgttctctactatgttaggaagctatttgcagttttgtatttgatagaatctcttcctgaatgcttgctccgatcctttgtggaatgaggcagaatataaataaatcaacagaaaacggtgctccagccacaagcaagagactgcccgtcctgcagggcctaaggaattcacgagcaacgcccgcccaggggctgggctcaatggctggcagccacaggtttcatcgctaaccaggccggagaagctgggcagaaaagcacctgtttgcagcttttcagcaggacctctccccctcagccctgtggacattggggctggatccttctctctggggtggggccgtcctgggcactgcagggtgctgagcagcgtctctggtctccacccactccctgccaggaagccccccaacaccccgagaccaagaatcatcagcttccaaatgttaacatgcacaagtagggaaaccgatgctaaaggattttaaggtcacagagctgggaaggggtggatcggggcctcaaacccctggctcccggccccccaggggccgagctgtggggatgtggatcccagactgaccccggcatggaaaaccaccagcgtggcccggcgccagacctgcttgtctgtcgcttgtctgcgagaggccaggaaatggctgggagagggagagacggttaaacgaaaaaacatcccaagaatgcacatggctcgtctccggccctggcagcccgccccgccggtgcctgcagcagagggtcccgtgatttggggctccgcctcagcatctgcgggatgggtgcccccggccgggcaggtccagacgccaaggtctgcacaggggtcacccggacacacctgactcggaccatgtggctaagtttgttttgaaatttcactgccccagcgtaacccagagtccaggccacgcccagcacggctggctcccgtccgggtctctgtgtcctgcagctcagggtggccagggcgggcgggcaggagggcaggcacctggcacccacccagacctgcgccctggccatcaggctgccccgggaagccgggcgaccgggaagatagcagagtcaacagggcgggtgcaggaaagggcgctccccatgcgagcctctgaagccctcggcacacagccctggaggctgggaatccttgagcgttttcctctgaggtctccaagtgtttatggtaacaagaggagggaggagggcgaggggacggccgccgctgggcagcagctccgcctgctggtcaccttcctcggggacatgcaaggacaagctgccgacggaaggggctttggcagaaatgcggggagcaggggacgcacccccacggacaggggcttttctggttgccaaacgtgcagacgacgggcctgacatccccatttcccaggaactctgtggatgggtgtcctggggctgccgtaagaaagtgccacaaatgggggactgggagggggtcttaaaaccacagacatggatcctctcccagttctggaggccagaagtccaaaatcatggggtctgcaagcctgtgctccctccagaggttccaggggagaacgctttctgcctcctccagttctgggggcgcaggtgtctctcagcttgtgtcctcctcggacacctggccagaatccactaggactttaaaaaaaaccattgcacccccccagtgccatcccagaggacccactcaataaacactggagcaactcccagggcaggggaatgcaggtgtgcccaggggtcagggcccatacacgcagctgagtgagccctgccaaccctaccagtcccagtcctggcccccgacattggtcccggcctggcctgctcaccccttcatgcctctctgtctaaggggcagggataggacgcagccctgctgctctctgtctggttctattttttttttttttttttttttgaggctgagtctcactctgttgcccaggctggagtgcagtggtgtgatctcggctcactgcaacctccgcctcctggtttcaagagattctcctgccttggcctcccaagtagctgggactacaggtgcactccaccatgtccggctaatttttgtatttttagtagagacgaggttttgccatgttagccaggctggtctcgaactcctgacctcaggggatccacctgccttgacctcccaaagtgctgggattgcaggcatgaaccaccgtgcccagctctgtgcctggttctgttttattttattttagagacaaggtcttgctgttacccaggctggagtgcagtggtgcaatcacagctcactgcagcctcaaactcttggcctcaagggatcgtccccactcagcctcccaagtagctgggactacaggtgccaccaagcccagttaatttttacatttttttttttgagacagagtcttagtctgtctcccaggctggagtgcagtggtgcaatcacggctcactgcaacctccccctcccaggttcaagcgattctcctgcctcagcctcccgagtagctgggattacaggtgtgcaccaccacgcccggctaatttttgtatttttagtagagacagggtttcaccatgttggccaggatggtcttgaactcccgatcctagatgctccacccgcctcagcctcccagagtgttgggattacaggcgtgggccactgcgcccggcctctgcctggttgttgaggcagagactggtgtcttcttccctcgtcttcccctcatatcaggcctcaagaaagacttccatgaacgctgtgggaaaatgcactatgatgtccctcactagaagtgccttcgccgcaggcccagcctgaaagtgattaatctctgcttcctcctctcccctcccccaacagagtttgtctaaaagtgcccagaggcctgggtgacagactgatggggggggccgcgggggtggaggggtgatgggggtgggggggtggggggcggagggtgtctctcgggtggcctggagcaccagcagtcaattccttcacttgcaaattgcccaggaggggtcagcagagatactgagttcccaaaccacaggggggtgagaacaggtctgaggctgtggggtgggatgtgggggccccctccctggtccctggtgttgtttaccaaacacagcagcaaagctgtgtctgcagccaggacgcctgcagccaagctcctggctgcactcccaatgcccacttctgcacgtgttttcaccccaccctgcagggatgggacacctccccttcttgagggtgaggacactgtgacatgttcctcaacaagatgcctggccaggccccattcactctgcatcacccaacaggtgttgaaacaacgcatgaaccgtgttatggtctaaggtgtaggctctactcaagataggcacaactttgtggaataaaatatcaaggtttcacaaggtgacaagtggccagttgctcaatttgtgttagagaaacagagaatgtctgggaggggacagggaggtgagaacattttgtggagggtttggcatgcagcctgtgccctataaccctcactttaagccagggtgccagcatcatcctatgtcacctaccacccatctcttgaagtcatcaccaaagtgaaaaagcaaaatggaaatactttgccaaagggacgagagacaaaaagttgaggtccttaatatataaagatctccaaaaaatcaataaaagtgaacaaaccagcttaataaatgtgggatcctggatcagatcatggaacacaaaagcacgtggaaatggaaaaaaggatgaaatttgaatcagccctatacttaatattgcagcaaggttgatttttttagtggtgataaatgttctgtagttatggaagatatcagccaatgggaagctggatgaaaggtgtaagggaacactctgtactatttttgcacctcttctataattcacatattatctcaaaatgtaaaaaataaaattgttaaaagtgaacataatccacaaaaagcattataaatgttcattatgaaaactttcaagctctccagtaataaaaaagattatagatcatacaatgagctgttacttttagcctttaaatgacaatttttttttttgagacagggtcttgctctgttgcccaggctggagtgtagtggtacaattgtgcctcactgcagcttggacttcctgggctcaagagatccacctagctccaccttccaagtagctgggactacaggtgcatgccaccatggctggctaattgttaattttttttttttttttttttttttttttttgagacagagtctcgctctgtcacccaggctggagtgcagtaacttgatcttggctcactgcaacctccacctaccacgttcaagcgattctcctgcctcagcttcccgagtagctaggactgcaggtgcaagccaccatgcccagctattttttgtatttttagtagagatggggtttcaccatgttggccaggatggtctcgatctcttgacctcaggtgatctgcccacctcagcctcccaaagtgctgggattataggcgtgagccactgtgcccagccaaattgttaaatatttttgtagagatggggtcttgctatgttgcccaggttggtctcaaactcttgggcttaagcaatcctcctgcctcagcctcccaaagtaatgagattacaggcatgagccactacacctggtctaactggcaagtattttttttttaaatagataatatccagggatggtcaagttgtgataaatcatggactagcagacagtgggtggaggacattggaataactgttcttgaaagcaaatctccctctggaaaactgtcctaaggatatttttctttaaacctttgtgtgttttctgaaaaaattttttagcaacaagccagtgttacttttgtaaacataaagttgtactattttgatgattaaaaatggacctctcaccccctttgtagactgtggaacccgggctggctcagcacagtcttgcagccgtcttcatggggtgaggttggggaggaccaagagctctcaccttcgactgccccaccctccagctttgcccgccccagcccaagctgtgtggcaagaccccttgttggtgcaggtgctgggggctggtggctgctggcattcccaccttctagagtgactttcacacttcctgatgagtttcccattccgctcagcaggcccataaataggattgtgcagaggtgcatatgcaagcactttacctgaagaattattatggataaaagtaaagaaataataaacaacttagatgcctcccttgagcccaagagtcccaggctacagtgagccctgatggtggcactgcactcctatttaatttaggagattagttcagtaatctgtggtacaaccaaaagataaaacacttaacattcactaaaaaggatgtcgcaaatccatatttgataatgtggaaagattcccataatatattgctaaattaaaaaaaacagattaaagaacagtatcaatagtgtgattctatgattattcagaaaagtccatacatgtgtgggtgtggtgcatattttttaacagtacatgtttggaagaactaaaagtcaccaggatgggttggagaagaggttggctccaggactgaggcagaaaaaaatattatatttctggagcatctttttgggccagaaagtaaggaaactcaaagaattatggcaacgtatcagaaggacacagagccagcttggctgggtgccagtggttcatgcctataatcctaccacttcgggaggctgaggtgggaggatggtttaaggtcaggagctcaagaccagccagggcaacatagggagaccctatctccgcaaagaattaaaaaaaaaaaaaaaaagcgatggcacgtgactgtagttccagctacttgggagactgaggtgggaggattgctagagcccagaagtttgaggctgcagtgagctgtgattgcatcactgtactccagcctaggtgacaggcaagaccttgtctcaaaaaataaaaaaattagccaggcatggtgatgtgtcccagctacttgggaggctgaggagggaggatcacttgagcccaagaggtcaaggctgcagtgaggcatgattgcaacactgcactccagcctgggcgacagggcagaccctgccttaaaaagagagagagagggaaggaaggaggaaggaaggaaggaaggagggagggagggagggaaggaaggaaagaaggaaggaaggagggagggagggatagagggagggagggaagtaaggaaggaaggaaagaaggaaggaaggagggagggacggatggagggagggagggatggagggagggagggaaagaaggaaggaaagaaggaaggagggagggagggacggagggagggagggaaggaaggaaagaaggaaggaaggagggagggagggagggagggatagagggagggagggagggaaggaaggaaggaaagaaggaaggaaggaaggagggagggagggagggaaggaaggaaagaaggaaggagggagggagggatggagggagggagggaaggaaggaaggaaagaaggaaggagggagggagggacggagggagggagggaaggaaggaaggaaggagggagggagggatggagggagggaagaaaagaaggaaggaaggaaggaaagaaggtaggaatgaaggaaggaagggccttgttcttagaaaatatccaccaagatctttagggttaatggggcatgatgtctccaacttaatttcaaatgactggaaataaattaatatgcatacatgcacaattacatacatataattctgtgtatacataactgcataataatatatctagcatatatgccatataagtaactatctttctgcgtatatatagatatatacatacatatccacctgcaatttatacataaatacatagacacacataaatgtgtatacacacacacggtgaacgatggagtgagagaataataaaagaaaaaatagggcaaggcaagtgtaaacagttggcatatttgagtataaagagtatacgaagtgcctgcggctattcttgcaacttctccgtaagttcaaaagtatattgaaaacagccagttagaaacaggcagcctggaagagattttaacagtcttcatctccagattgggattaccaggggaacttttccttttaaaaacaaaatggagacatcattcatataccataaaattcaccctcataaagtgtaaaattcagtaattttttttttgagacagaggcttgccctgtttcccaggctggagtgcagtggcgcgatctcggctcactgtaacctccgcctcccgggttcacgccattctcctgcctcagcctcccgagtagctgggattacaggcacccgccaccacgcccggctatttttttgtatttttagtagagacggggtttcaccatgttggccaggatggtctcactctcttgacctcgtgatccacccgcctcggcctcccaaagtgctgggattacaggcgtgaaccgccgtgccccggccaaaatgtattgatttttcagtatccctttttctttaaatctttgtgagttttctgaaatattttttcagcaacaagccagtgttacttttgtaaacataaagttgtacgattttgatgatgaaaaacggaactctcaccccctttgtagacttgtggaaccggggctggctcagcacagtcttgcagccgtcttgatggggtgagatcggggaggatcaagagctcccaccttccactgccccaccctccagctttgcccgccccagcccaagctgtgtggcaagaccccttgttggtgcaggtgctgggggctggtggctgctggcattcccaccttctagagtgactttcacactccctgatgagtttcccattccgctcagcaggcccataaattcaaagcgagggccgcaaatggggaatctgggatggcgcgtctggcttggggggctgggagccagcgggcccagacaagctgctggtgacctcggtcccccaagagctcagctgaggctgaaagggaaggatggggagggaaggacactcacacactctggaaatgagggcaaatcccagccctgacatttgacagccaagggctcaaatgaaaaagaaggtagaatttacacacacgcacgcaagcatccctcaatgggaactcacagtgaatatcgtgtgtagatccagtagaatgtcaccttggccgggtgcagtggctcacgcctgtaatcccagcactttgggaggctgaggtgggcggattatttgaggtcaggagtttgaaaccagcctggccaaaatggtgaaaccctgtctctactaaaaatacaaaaattagccgggtgtggtgtcacgtgcctgtagtcccagctactcgggaggctgaggcaggagaatcgcttgagccggggaggcagaggttgcagtgagcagagattgtgccaccgcactccagcctgggtgacagagcgggactccatctcaaaaaaaaaaaaaaaaaaaaaaaaagaatgtcaccttgaaatcataatgacagtggagaatcctggcatccactaccacgcaacaccacatccggctaatttttggccccagacgtcacccgatgtcccccaggggctaggatcagccgcaggttaggacccctgggttggaggtttcaccacggagagttgcggcggcaagaagacaccaggaggaagtgacctgcacacaatcaccagatcgtccctgagcatctggctctagggtctctgcctggaccgaagcattcccaggtgcagacccaggggtctctcctgtccctccgacctcacctgcgtaccctgcgttgcttcctctgccggggaagctcacccacgttctcaggtcctgggcggaagggcagagggctccccgggcacaatgtcttctgatgagaatcacagctgctgagatgcaactgcaaggggctgggaaagttcctgggacccaaaggagctgtgagatctagcgcctgggatggcagaggctctggccggtgaggacaacagccggcgtcagctcgggggtcggtacgcaggcggccaccttgtaacggccacaaacgggcttcaaaggggaggcaggcctgggctgctgagtcacccgggcctcatgcagttcacaaaaagctgtaactcgaggcagcatcacaccgaccgtggaagcatggaagggagggggacgctgtctcagcctccaggagctacctggcaggctgaggcaggagaatcacttgaacctgggaggcagaggttgcggtgagccaagatcgtgccactgcactccagcctgggcgacacagcaagactctcatctcaagaaaagagagagaaagagagaaggaaggaaggaaggaaggaaggaaggaaagaaaagaaaagaaggagagagagagagaaggaaggaaggaaagaaaagaaaaagaaagaaagaacaggaacaagataagggtggccactctcactgtttctattcagtattgttattgcaaattcaagccagggcaactgggcatgaaaaggaaatgaaaagcatccagattggagcaagagaagaaaaaccatctctctatttgcaaacggcctgttgtggtgtaaaaggtccccgggtacaatttgtgcagcagaaatacggcacttcacaggctgcttagaaacctagcaagtcccttgagcacaaactattttcctaagcttggtgggggcgtgagagggtggccggggactggtgacaatgttgtttgtgcactgggagagtccggctgaattgcaactggcctttacatcctaatcagctccctgaggacaacccgaaagacatcagattaaaaagtcacaatgagataaaccagcacgacgcggctctctgcaaagcgacaggtagtaaacagaccttaacgcacgtcatgaggtttgtttttcttttaaaagtcaacagctggtgaatcgcacagggccgggcagggcggtcaaagggcccgttcccccggctgggaaaaaagcaggagcccagggcggcggcagctggacgcgggccccgtggaactttctcccgtcagtcaggggccgtatttcttagccatcctcctctgaccttcatttcaaaccgcctgctgacgcatctaaccttggcccgttccgtgggaactccagactcagggtgaccaaccccagctgggttacccagggttgtcctggttggagtggctccaagtcctcagacccagcaaacccaggcttgctgatcacaccgcagaccccaccaggtggtcatctttctggggaaactggcttcttttcctccccgactcccttgctttgtcttcgtggtggcacctctcttcccaggtgctcaggtgtgacatcagccgtcccttgctggccctggtgccagctgactcccaggtctcctttctcttctttaagatggagtctccctctgtgacccaggctggagtgtaatggcgcgatcttggctcaccacaacctcccccttccaggttcaagcgattctcctgcctcagcctcccaagtagctgggattacaggcatgagccaccacacctggctaattttgtatttttagtagagatggggtttctccaccttggtcaggctggtctcgaactcccaacctcaggtgatccgcctgcctcagcctcccaaagtgctgggattccaggcatgagccaccacgcccggccgtctctttcttctaagatggagtctccctccgtggcccaggctggagtgcagtggcgcgatatcagctcactgtaacctccgcctcctgggttcaagtgattctcctgcctcagcctcccaggtagctgggactacaggtgcacttttttttttttttttttttttttaaatagcagagatggtgttttgccatgttgaacaggctggtcttgaactcctgacctcaagtgatccgtccgccttggcctccctaagtgctgagatcacaggcatgagccaccatgcctggcctcccagatgtcatttcttgcagctctcggagtcttccacgtgtctctggatcttcctgtgtcattcccacctccgctgtttgactctggtcccctcctcccatgtcagatgatggcagcagtaaggaaatgatgccttgatttagctcttttaggccctgcgcgtagggggttgtactaagtccaggagcatttaaaacctcactgcatacgcactacaacgtggatgaactccgaaaaatcacactcagtgagagaagccagacaaaaggccacacagtgtgtgatcccattgacatgaaatgttcagaacaggccagtctcgctctgtcgcccaggctggagtacagtgacatgatctcagctcactgcaacctccacctcccgggttcaagcgattcttctacctcagcctcccgagtagcttgaattacagacatgcactgccgtactcagctaatttttgtatttttagtagagacagggtttcaccctgttggccaggctggtctcgaactcctgacctcaagtgatccacctgcctcggcctcccaaagtgctgggattagaggtgtgtgagtcactgtgcctggcctttatagcatataattttatctcaataaagctgttaggaaataaactataggtaacaacattatcaagaggttgggcctcttatccaggtggatttttcaaatgaatcagtttttaaaagtaccattaaaaaacaaaactataagaggtaaggcaaaaaatagaacaggtaaagaaaatgggtcagtcttccttttttctctatcgggcacataacaattttccatatcttatagataaaactgaggcttagaaatggtagaattgtgtgaattatatcttgataaagctgtcgtctatatctatgtctctatatctattcatccatccacccatccattcactcatctatccattcatccacccatctgttcatccatccatccatccatccatccatccacccacccatccacccacccaaccaaccatccatccatccgcccactcatccattcacccattcatccatccatccacccacccacccacccatccatccatctatccattcatccatccatccgtccacccacctatccattcacccattcattcatccatccacccatccattcatccatccatccatccacccattcatccatccatccatccatccatccacccacccatccacccacctaaccaaccaaccaaccatccatccatccacccaaccaaccatccacccatccgcccacccaaccaactatccatccatccactcatccatccacccacccatccattcacccatccatccatccacccatccatccatttatccatccattcatccatccatccaaccatccatttactcatccatccatccatccacatacatacatactagaaatggtagaattgcaactagaattcaatatttgcaaatcctggtgcaataaatattattcttactcattttaaaatgttaatatctactttatttttcaaagttgagcacgatataagtatgttgttccttggattcctgatgctctcagtaacctagcaactcagcacctcacagagaacaagaagaacctcttgcgcggtaggtttggcttgcaaacaagccgttccacgctggaaggctgtgtcaaccgatgatgtggaagaataatcatccctccttgctgtttcttatgagatttgtcaggcatactcctacttgccaatactatttgccaacatactactccgcctcctctctgtttcctctcttgtaagatggcaataatgcatgcaggatgatttccatccctttctttaaaccttttggtatttttaagattttctagtatgtcactgttttcgtaatttgaaaataaagggttttttttttttttttttttttaagggagagattataggggactgagtgtgtggccttgagtttgtctgtttccaaactccctattgaggctgttcaaccaaagaaccaaagttgggggaaagtctatcccaaggctccagcccaaaggaagctctcttctacaatgggtgtgttaggatggaggagagccacaaagccagtaaaaaggcacatagcaaactggaagaaaatagtaatatgtagcatatgtaacaaagtgttagtgcctgtcatatgtaaagagcacctacaaatcaataagaaaaactcaatagccaaatagaagatatacagaggtacttagtgcaaagatactaacaatcagaaaagaaaggaataggtgactgatctcactgatggccaaataaatgaatattataacaccaaagagacactaatttcacataactggctggcaaaacttttaaattcagttgataaccattatggcaaggctgtgggggaactggcattttcactcactgttgacaggagttcaagttgctataaactttgtggaaggttattcgtcaatgattaacagaattgtaaatgccactatcttctaaagctgcatttctgcttttaggaatttacctcctgagatatttagacaaggtcaaaagtgatgtataccatgatgtttctgctgcaacattatttggatgtaagaaaaactgtaaagatcagtagtgtgttcttcaagtcactctggcatatccatacacaagaacgcgctaactaaaaagaatgaagctcactgatcacactgacaaaaaatggcaaccaaaaacaactcttaacatttttcaaaaggctgaaaagtagagttgctacattaaaaaaaaattgctccttctatcacagcatttttatttctagcaatgtggcagaaaacatcactttaaatctctcctcctctaaaacccaagcaagactggatgaaagaaatgaacaaaggccaggtgcagtggctcatgcctgtaatcccagcactttgggagactgaggcaggaagatcgcttgagcccaggagttcatgaccagcctgggaaacatagcaagatcctatctctagaaaaaatttttaaaaagcatccaggtgtgctggtatgtgcccatggtcccagctactcaggacgttgaggcagaaggattgcttgagcccaggaggtcgaggctctagtgagctatgattgcatcgtttcactccagcctgggtgacagagcaacaaggagagggaaggaaggggaggggaggggagggggaggggaaggaaggaaggagagggagggagggaagagagaaagaaagaaagaaagagagagagagagagggagggagggagagagggagagaggcaggggagaggagaaggaaaaaaagaaagaagaaaacgaaggaaggaaggaaagaaggaaggaaggagagggagggaaggaaggaaggaaggacggaagaaagaaagaaagggagggagggagagagggacggagggaggggaaaggagaagggaaaaaaagaaagaagaaaaggaaggaaggaaagaaggaaggaaggaaggagagggagggaggaaaaaaaaagaaaagaaaatgcatactctttctaaccaacagctgaggtcacaaaaaagtaagaaaatccagcacagactaaaaacttcaaagaggacagggcaccgggtggtgagaagtggcctgtggccacccagattgaggggagaggcttctggtcttggtcaccaacggcctgatgttgttcttaatctctgcctctcttaaaaatgtatagtggaaaattccttttttaaaaaaaaaacttggaatgtttgtctttattttgtgctttatattttcaaagtgaaaagaaatagtattgagtcaatttttgttttttaaaatattcgttctatatatttacaagccttcaagctgctctaaagatttcaaaagtattaagagtaggactgggcgtggtggctcacacctgtaatcccagcactttgggaggctgaggtaggtggatcacctgaggtcagaagttcgagaccagcccgggcaacaaggcgaaacctcgtctctactaaaaatacaaaaattagccgggcatgggggcggctgcctgtagtcccagctactaggggtgctgaggcaggagaatcgcttgaacctgggacacggagcttgcagtgagccgagattgtgccactgcactcctgcctgggcaacagagtgagactccatctaaaaaaaaaaaaaaattgcaaatacttttcccggggtagcactttttttttttttttaaacaatccttggagttctgtggtccatgccatttccttctgtttcaatgttatatatgttttgattactattgtgatgttttaagttttctgaagcaagctgagaggcaggccgaaatatttgatgccaaaaaaaaaaaaaaactttcttacctcattcaccccaaaccttctcaaatctggattaaatactatactttaaaacaaacatgaggtgcttctgaaggggaggaaaatttatttctctgcttttctattatacaagttgtttacagaaactgcaaatcaaggccgggcacagtggctcacgcctgtaatcccagcgctttgggaggccaagacgggcggatcacctgagctcaggagttcgagaccagcctggccaacatggagaaaccccatctctactaaaaatacaaaacacttagctgggtgtggtggtgggcacctgtagtcccagctacttgggaggctgaggcaggagaatcgcttgaacctgggaggtagaggttgcagtgagccgagatatcacaccactgcactccagcctaggcgacagagtgagactccctcaagaaagaaagaaagaaggaaagaaagaaggagggaaggaaggaaggaaggaaggaaggaaggaaggaaggaaggaggaagaaagaaactgcaaatttaaaaaattacatatagtggaaaatttcaaacacagcctgaagcacgcaggccaggacgaggtctctctgagtgtcgtcacctcctgcaacgggaattaacattctgcccttcttctgttctcacttctctctccagctttgcacgggtatttcacacaaattcaagacatcatatgactttgcctgtagaaccttcagaatgttctctaatcactgaagctttctgatttcccaacacagaaccacccaatcaaattaacactgtcttattatcaacttgctccatgattatcaacaataatttcctgttaccaataaccagcctgtgacccattgtccatgattatctcaaaaatgtctttaatggcccggcgtggtggctcacgtctgtaatcccagccctttgggaggctgaggcgagctgattgcttcaggacaggagtttgagaccagcctgggcaacataccaagacctcatctctacaaaaaatacaaaaaaattagctgggcatggtggcacgtacctgtagtcccagctatttgaaaggatgaggtgggaggatcgcttgagcccaggtggtcaaggttgcagtgaaccatgatggcaccactgcactccagcctgggcaacagagcgagaccctgtctcaaaagaaattaaatttttttttttttgagacggagtctcactctgttgcccaggctggagtgcagtggcgtgatcttggctcactgcaacctccacctcccgggttcaagcgattctcctgcctcagcctcccaagtagctggcattacaggcgcccgccaccacgtccggctaatttttgtatttttagtagagacggggttttgccatgttggtcaggccggtcttgaactcctgacctcagttgattgatccacacacctcagcctcccaaagtgctgggattataggtgtgagccaccatgcccggctgaaaggaaattaaatttaagggccgagtgcagtggctcatgcctgtaatcccagcactttgggaggccgaggcgggtggattgcctgagctcaggagtttgagaccagcctgggcaacatagcaaaactccgtctctagtaaaaatacaaaaaattagccgggcgtggtggcgggtgcctgtaatcccagctactcgggaggctgaggcaggagaatggcgtgaacccgggaggcggagcttgcagcgagccaagatcgcaccactgcactccagcctgggcaacagagtgagactctgtctcaaaaaaaaaaaaaaagaaattaaatttaaaaaggtaaaaagcagctcaggaccgccaatgtacaatgcactccatatggctgtacgtatctatgtgagtgtgcatgtgtaggaaaagtctagggagtttcagtggttagacgacaatgaccaggacaactgtgtgagcagcacctgtgtggcactgagtcatctcaggctctccactcggctctgtccatcaacgaccgaatccagctctcacggcgactctacgctgcatgcttgttactctactacagaggaggaagcaacgcttacgaaaaccaaggaccagaagaactcacaatcaaaactagtgggcggccgggcgcggtggctcatatctgtaatctcagcactttgagaggccgaggcgggcggatcacctgaggtcaggagtttgggaccagcatggccaacatggtgaaaccccatctctactgaaaatacaaaaattagccgggtgcggtggtgcatgcctgtaatcccagctacttgggaggctgagacaggagaatcgcttgaacccaggaggtggaggttgcagtgagctgagatcgtgcctctgcactgcagcctgggcgacagagtgagagtcggtccctaaaattaaaataaaaaatagtaggcaggcccagcgcggggctcacacctgcaatcccagcactttgaaaggctgaggcaggaaaatcacttgagcccaggagtttcagaccagcctgggtaacatagtgagaccccgtctcaattaaaattaaaaaaaaattaagcaggtgtagtgatatccacctgtggtcccagctactcaggaggttgaggtgggaggatcgcttgagtccaagaggttgaggctgtagtgagccatgattatgccactgcactccagcctgggtgacaaagtgagaccctgtcccccccccaaaaaaaaaagtgggcaaatatcgacccagttgttctcctttcacgttctgcactgatgatcagttcccatccaccccacactgttaacagtggttaattctggggagtgagatttgtgatgaagatgtctccattctcactcctgcagtacgagacttctttacaaatatattctcaacagggtgaacatcaattcttggggagatgaaaacaaattttactttttttatggattaagcccagaaaacagaacataaacagatacacagtctatctatgatattgaaatttcacaggtataggctgggctcggtggctcacacctgcaatcccagcacttttggaggctgaggtgggaagatcacttgaggccaggagttcaagatcatcctggacaacatagcaagacccaatctctagaaagaataaaaatttaaaaattatccaggcatggtggtgtgcacctgttatcccagctttggtgactgaggcgggaggattgcttgagcctgggagttggaagctgctgcagggagctgagatggcgttactgcactccagcttgagtgacagagaaagaagatcctgtctctaagataaaaacaaacaaaaactccattatataataatgctacttggggccagtcacagtggctcacgcctgtaatcctaacactgtgggaggccgaggcaggcggatcacctaaggtcaggagtttgagaccagcctggccaacatggtgaaaccccgtgtctactaaaaatacaaaaattagctgggcgtggtggcgggcacctgtaatcttagctactcaggaggctgaggcaggagaatcgcttgaacccaggaggtggaggttgcagtgagccgagatcacgccactgcactccagcctgggtgacaagagcaaaactccttctcaaaaataataataataaggccgagtgtggtggctcacacctgtaatcccagcactttgggaggccgaggtgggtggatcacgaggtcagcagatcgagaccatcctggctaacacggtgaaaccccgtctctactaaaaatacaaaaaattagccaggcgtggtggcgggcgcctgtagtgccagctactcgggaggctgaggcaggagaatggcgtgaacccaggaggcagagcttgcagtgagccgagattgcgccactgcactccagcctgggcaacagagtgagactctgtttcaaaaaaaaaaaaaaaaaagaaattaaatttagaaaggtaaaaagcagctcaggactgccaatgtacaatgcgctccatattgctgtacgtatctatgtgagtgtgcatgtgtaggaaaagtctagggagtttcagtggttagacgacaatgaccaggacaactgtgtgagcagcacctgtgtggcactgagtcatctcaggctctccactcggctctgtccatcaacgaccgaatccagctctcacggcgactctacgctgcatgcttgttactctactacagaggaggaagcaacgcttacgaaaaccaaggaccaaaagaactcacaatcaaaactagtgggcggccgggcgcggtggctcatatctgttaatcccagcactttgggaggccaaggtgggcggatcacctgaggtcaggagttcgagaccagcctggccaacatggtgaaaccacatctctactgaaaatacagaattggccgggcgtggtggctcacgcctgtactcccagcactttgggaggccgaggcgggcggatcacgaggtcaggagatcgagaccatcctggctaacacggtgaaaccccatctctactaaaaatacaaaaaattagctgggtgtggtggcgggcgcctgtagtcccagctactcgggaggctgaggcaggagaatggtgtgaacccaggaggcagagcttgcagtgagctgagatcgcgccactgcactccagcctgagcgacagagcgagactccgtctcaaaaaaaatgaaaagtaataaaataataataataataataataataataataataataataataataatgctacttgggcatcttccgtcaaaagaatcagacatcgggtgcatttaaatctcttgccaccgttattctttctaaggagccactaggaaaaggatgtctcaaaagaaggtgatcacggaaaaagaaagcttatgaaacactgacttctgtaatcacgttttcagttgaaagaaatggaaactgatctaacttccagctcacctcaagctggaaagaagtctagtttctagaagcatctccaaaattggaaagtgaagtttctagcatacagttccaccgagggcccatgatgaagagggggagaggcgggcacgaggcgaagcgggtgccccgcgctcggctggaaaaagccaatgtcaccgggctgtgctatttgcttgtgggagggacgcctggggtgggggcgtgccgctggttgctccgccgcagacaccacgtggtgctttttgaactgatcagagccccagcctgcctgctttgctgtcccgggctgacctccgaaaacaccgcactttcccctcgctgacttggtagatgtctgtctgtctgcttgagtatctcgaagatctgaggtttccattccagcagaataaatactaggagggcccaccccttcctcctcccagccgaggctggatgaatccaaataaacccagctggtggggaagagcatttctaggacttcggcgggagaaagcaccgcccacccgggtgggtttccaggaggtggaggtgcggacctgggaggggggccctcgggcagccctgccatgcagccgcgtcactccgcctgcctgatgtcacaggagctgggggagtttgggtatttcatgaagctgttgagttattgtggctttggtttgtgacaccggcgttcaggcacggcctaaaggcaacatcaaagacggtgcatgaaaaccgggggttaggccgggcgcggtggctcacgcctgtaatcccagcactttgggagaccgaggcaggcggatcacctgcggtcaggagttcgagaccagcctgggcaatacggcgaaaccccgtctctactaaaaatacaaaaattagccgggggtggtggtgctggcctgtgatcccagctactcaggaggctgaggcaggagaatcgcttgagccctggaggtggaggttgcagagagctgagatggcgccaccgcactccagcctgggcaacagagcaagactccatctcaaaaaaaaaaaaaaattagattgtggtaatggttacacaactctggatattctaaaaaccactgaattgtacactttaaaaagtgaattctatggcatgtaaaaatctcaataaagctgtcatataaaataaatatatataaatatgatgccaaaatatatacataaatatggtaataaaaaattaaggcccttaaacagcttgtgtttatgtagattttagctatactcctgttacaagttaacataatcccattaaatatttttttaaaccatatattttatattaggaggatgacacgtttaagtgaaaagtaactatttttcaaaaaaaaaaaacattgaggggaaatagtggcattgttttacatttttgcaaatttctttcatgtctggcttaatagaagacagctggattcttgtataagcctctgagttcaatccactgtgatatcaaacgtcatgcaacctctgaaaactccaccatctgtgtgggagagactgggaggaaggagacccagagtatcttggcatttttttttttttttttttgtgagatggagtctcgctctgtcacccaggctggagtgcagtggcgcaatctcagctcacttcaacctccgcctcctgggttcaagtgattctcctgcctcagcctcccaagtagctgggattacaggcgccaccaccacacctggctaatttttttttttaatttttagtagagacagggtttcaccatgttggccaggctggtctcgaactcctgagctcaggtgatccacccaccttgacctctcaaagcgctgggattacaggtgtgagccacagtgcctggcttctatcttagcagttttgacctagtggtcccccaccaaaagggtctcagagaccaacccctgggtgtccctggaccacactttgagaactccaatacacaggtattctctctacttcacagaagagaaaatgcgatccaagatggtaataaacctgctcaagtcctcaaagctgaaaagtacggctgaaggagaataaaaaagagaaacataaagcagttgtggtggtgtgtgcctgtgctcccagctacttgggaggctgaagtggtaggatcgcttgagcccgggagtttgaggctgcagtgagctaggatcacgccactacactccagcctgggtgacaaggagagacctcccccccgccaccatctccaaaaacaaattattacttatgtaaaaaatagaactaaggaaggtttgcttgactccaaagctgtgttctttgcatccattctagttccatccagatggcccggggtacagctgggatgcctgttgtccctaaaaaccatggggcacaagtaggtaaaccctagagtaggtaactcctcaattcagctcaaccactatctgaccagcctccagttaccaggcagtgtgtttccccagccatgtggactcagtcctgccacggcgcggctcgtgcctattgcagatacatgtacatgcttgcaatatacgtgtctgtctcccctgctctacaatgagctccccaggaacaaggactgggcaattttttttggcttcctgtctccactgtttggcagcaggaaaagagaggtgcctgaagaaagggtaacagagcaatgcaatcccccgatgtcagatttttattgaggaaaagaaaggcagtgaaggccgggcatggtggctcacgtctgtaatcccaagcacgttgggaggccggggcaggaggatcccttgagcccaggagttcgagaccagcctgagcaacatggcgagaccctgtctttataaaaaaattagccgggcatggtggtgtgagcctgtagtcccagctactagggaggttgaagcgggaggctcacttaaggaggctgaggttgcagtgagttatgatttcatcactgcacttcagcctgggccacagagtaagaccctgtctcagaaagaagaaaagagaagacaggggaggggaggggaggagaggagaggggaggagagcagtggaatcccagatgatccttccagaatctgcaagcagcactgtggaggcaccctggggaagaaagtctgctaggatctggagaagcactagaagccgggcacagtggctcacgcctgtaatcccagcactctgggaggccgagatgggcaggtcacctgaggtcaggagttcgagaccagcctggccaacatggtgaaaccccgtctctactaaaaatgcaaaaattagccgggcgtggtggtgcacgcctgtaatctcagctacttgggaggctgagacaggaggattgcttgaacccgggaggcagaggttgcagtgagctgagatcgcgccactgcactccagcctgggcgacagagcgagactccgtctcaaaacaacaacagaaaaagcagcactgaggactgggctgcgggctgcgtcctctgcaggccctggctcccctgtacccaccccctcctgcacgcttttaagcagatccagcactcccttcagggcgctggggaggagctgccagcagacaggaatgcgctgtgcagaagcagcaggttctgccagctcctcccgagcctgcagggaaatgcaggcagatctgtggcctcgcacaggcggacagacgggcagcagggatctccaaccgggccccggagcacgaaccactacgcaatcgtcacagcatgtgctaccttccgtggtgttctgggaatctaaatcaatcccatacgctggacagcaagccagaaacggaagccaatctcgggctgggcagagggccacccggccctcccctcaccaccacccctcccttttccttcaatcagaattgccttttataggcaggttgatagttcacagctggaagggggctcactgcggctctgcaaggaaagatgcgctacccacccttttctctctttctctttctttttctctttttctttctttctttctttctttctttttgtttcttcctttcttcctttctttcttttctttctctttctttctttctctctctctttccttccttcctttcttttctttctccctttcctttccccttccttccttccctttctttctttctttttctcttttctgttctgttctgttcttttttttgatggagtttcgctcttgttgcccaggctggagcacaatagcacagtcttgcctcactgaaacctccgcctcccgggttcaagcgatcctcctgcctcagcctcccgagtagctgggattacaggtgcgcaccaccatgcctggctaatttttgtatttttagtagagacggggtttcaccgtgttagccagggtgatctcgatctcctgacctcgtgatccacccgcctcggcctcccaaagtgctaggattacaggcgtgagccgccgtgcccggcctaaagctgtgttctttctgttccacaggctgcagagagggagctgatgccagaatgagggggaacccccggagcttctcgcatcgggtgggaccggcatccggtgagaccgcggtggctctctggggctgaaaattccaagcagagtagcccgaggaatccagccatccccgagggttcagaaatgcaaatcagggctgtgtattcacagcctggactggagatcgaccaaaaactatgcagggctcacccttgcggggcggcggctaaatttaggaaaccaaccatctggagaatgcaggcatcagaagcccctgcagctaggaggatcatttcagttcatttttattcactgttcatagatctcccagtttttcctagcgtgttcaagctggaaaggatttcagagattgtgtcacctagatttattttacagaaggaggaactaagcgtttaagggagaagtgcctgttcttttattattattattattattttattttttgagacagagtctcgctctgtcacccaggctggagtgcagtggtgcaatctcggctcactgcaagctctgcctcctgggttcacgccattctcctgcctcagcctcctgagtagctgggactacaggcgcccgccaccacgccccgctaattttttgtatttttagtagagacggggtttcactgtgttagccaggatggtatcgatctcttgacctcgtgatccacccgcctcggccccccaaagtgctaggattacaggcgtgagccaccgtgccgggtctcgagaagtgcctgttttaacacactgaaaagtggtcttagccaggtgcagcataatatgcccgtctcccagcactttgggaggccgaggcaggaggatcgcttgaggccaggagtttgagaccagcctgggcaacatagcaagaccccatcactacaaaaaataaaaataaattagccggatgtggtggcgtgtgcttgtggtcccagctactctggaggctgaagcaggaggatggcttgaaccaggaagtcgaggctgcagtgagctaggactgcgccactgcactccagcctgggcaacggagcaagaccctgcttcaaaaaaaaaaaaaaatgaatgaaaggaaggaaggaaggaagcgagggagggagggagggagggagcgagggagggaaggaaggaaggaagcgagggacagagggaggaaaaagagaaagttttctgccctagacactccagcctgggcaacggagcaagaccctccttcaaaaaaaaaaaaaaaaagaatgaatggaaggaaggaaggaagggagggagtggggagggagggagggaaaagagaaagttttctgccctattatgtgattttcacaccaccccaagttcaagaacaaagtgtggtttgtttgaatgcttttcccagacagagatgcagggcagtggcgagaaggaaacaatccagtggcggcttcccctctcttagaagtattaggcccaagaaaccacctgaaatcctgggatgaactagattctgtcgttggagtccaagtccttttggctgtcagtatgagtggcttgaagccgctataacaagtcacacggatctggtggcttaaaacaatggaaatggattctctatggctctggaggtcagaaatctagatgtgggcaaggccgtgctccctctggaggctccaggggaggatccttcctgcctcctccagcttctggggcctccaggcatcctctggcttgagcccacatggctccagtctctgcctccatctccccatgcctttcctcatgtgtcaaatctcactgttgttttttttgtttgttttttgagacaaggtctctctctgttgcccaggttggagtgcaccagacaccatctcggctcactgcaacctccgcctcctgggttcaagtgattctcctgcctcagcctcctgagtagctgggactacaggcacctgccaccatgcccagctaatttttgtattattagtagagacggggtttcaccatgttggccaaacaggtctcaaacttgtggcctcaagtgatcctcctgcctcagcctcccaaagtgctgggattacaggtgtgagccaccacacctggccaaatctcacttttttttttttttttttttttttgaggcagagtcttgctttgttgcccaggctggagtgcagtggcttgatcttggcttactgcaacctctgcctcctcagctgaagtgattctcctgcctcagcctcccgagtagctgggattacaggcatgcgccaccacacccagctaatttttgtatttttagtagagacggggtttcaccatgttggccagcatggtctcgatctcctgacctcgtgatctgcccgccttggcctcccaaagtgctgggatgacaggtgtgagccaccgcagcctgccaaaatctcactcttataaggacatttgtaattgtttagggtccacctggagaacccaggataatctgccgtctgaagatccttcatgtgatcacttctgcgacctctttgtcctataagggaaaattcacaggttccagacatttaggagccaatatctttgggggcattactcacacgacatacaaagtctcttttcagggcaaacatagatgctcacaggaaatgcctccatgccccgcagtcgggcaagcttccaagcaagcaagccgcttttaagagtcaggaagaggctgggtggctcacgcccgtaatcccagcactgtgggaggccgaggtgggtggattgcttgagcccaggagtttgagaccagcctgggcaacatagtgagatcccatctctacaaaaaatacaaaaattagctgggcgtggtggtgtgcacctgtagtccttggggggctgaggtgggaggatcacttgagcccaggagttggaggctacagtgagccgagattgcaccactgcactccaacctgcgtgacaaagttagactctgtttctggccaggtgcagtggctcatgcctgtaatcccagcactttgggaaactgaggtgggcagatcacctgaggtcaggagttcgagaccagcctgaccaacatggagaaaccccatctctactaaaaatacaaaaattagctgggtgtggtggtgcacgcctgtaatcccagctattcaggaggctgaggcagcagaatcgcttgaacccgggaggtggaggttgcggtgagccaagattgtgccactgcactccagcctgggcaacaagagtgaaactctgtctcaaaaaaaaataattaattaattaattaattaattaatttaaaaaaaaagttagaccctgtctcaaaaataaaaagtcaggatgagagaaggcagccaaggcaaggaagaccaataacatgctcggatggtgcagtctctttggaacattccaaaactaaactgagaaggttcccattctcggtgatgacaagtttctggaactagatagatagtgctggtgtttgcacgcagtgttcatggaaataatgccatggagttgcaaacttttgaacagtaaacaagggccgggcaccgtggctcatgcctgtaatcccagcacctcaggaggccgaggcggggggatcatttgagcccaggattttgagaccagcctgggcaacacagcgagaccctgtctccacgaaaaatttaaaaattagctgggcatggtggtgtgtgtctgtagtcccagctactcaagaggctgaggtgggaggatcacttgagcccaggaggttgaggctgcagtgagctgtgatcgcaccactgcactccagcctgggcgacagagcaagaccctgtgtcaaaaaaaaaaaagaaggccaggtgtggtggctcacacctgtaatcccagcactttgggaggtcgaggcaggcagatcatctgaggtcgggagttcaagaccagcctggccaacatggagaaaccctaacatttttagtttctactaaaaattcaaaaaattagccgagcatgatggcaggcgcctgttatcccagctacttgggaggctgaggcaggagaattgcttgaacctgggaggcagaggttgcagtgagccgagatcgcaccattgcactccagcctgggcgacaagagtgaaactccatctcaaaaagaaaaaaaaaaagaaagactaaaatggtaaaaaaaaaaaaaaaaagaaagaaagaaaagaaaaaagaaaaagaaatacatattaggatggggcaagctaaactacattgttatgtattttaacaacacataaaacccacttggggccagtctgcaagtacctcccatgtaggctcagcctggcacttgaaccccgtgccctccgccccccgcccctcccagtggcgtctccgcttctcacttcagaggcagagctgtcatcgtgggcactgggaagtagcctgcagtgtcagcacagaccggcgctcaccaacgacacggcacggaggctttctagggagcagtccccccaggacagcaatacgttcaggcgacagcgacacagggcagcaacagcggttccctcctggcaggcagccagacgcacacacgcacgcagaccacaccatccagaaagttcacctgcgacctgagacgcagctctttgagggagatcagaagatcagatggtatttgagaaaaaaaaaaaaaaaaaggttaagccaagtcagtgggaaggtggaggaaaaaaaaaataaataaaggttaggctgaggtcgccgccctgccactcatgacacagagcgtggcacgtcggtttcacacctaaaagtcagaacgattcacaggtggcgaagcgtgggtggaggaaaagagcggggatgtctgaggagcagaaagaccgaaacgcaagagtaatacctgctgcggagaggttccgcccacgtgggatttgcccctgggaaaaaaaaaaaaagtccccgaagcccctgcaaggcaaggcctgcgggctggagggacgggctcttcacacacacgggaggacagagatcgtctctggaggtgggcgccccagcaggcacactgacggcctcggtgcagctcccctgcacccccaaatgacgcaggtcagtaatccagggacgggcagcaggctcacgtgtccccagatgcaggcacacctgtgcctctcgagtcatctgcagagtcacgagaccagcaacctggaaacctggaggagctcccctggctgccaccggacaccccagggcaaggggccgggtgcctcccgggcaaccccctctctctgcagcaggggatgcagatggcagagtctcaaaggccttccctgcatggggcagacacggaggacacactctcccggggtctgcactgaggctgtcagggggcctgctgcgttccccactccaggtaaccctgtctgctggcactgagggcctcatcagacccctgcaggcctgcaaccacagccaaaatcagtgtgccttctccaaagccaccttctgacccgctttttaaagaaactgaggtaaggtttgcataatgtaaaattaagcattttaaagtgaacaattcagtggcattcaacacattcacaacgttgtacaaacatcatgcctacctagttcttgtacattctctctctctctctctctctctttttttgttttgagacagggtctcactccatcttccaggctggagtgcagtggtgcgatcttggctcaccgcaacctctgcctctcaggttcaagcaatcctcctgccttagcctcccgagtagctgggattacaggcatgcaccaccacacctggctaatttttaatttttcgtagagatgggggtctcactatgttgccaaggctggtcttgaactcctagcctcatgatcctcccacctcagtgtcctgtggagctgggactacaggcacgtaccaccccacccagctaatttttgttttacactaaagtgttatttcatcttggtcgctgaggttttttagcgcccccttcaattttgtgcccagtgtgaatacattgcttgcctgaccctggtcctgccctgggatttgggagccgacaggtccgggtaacaactgcagtttagccgctcacttgctggaggacctcaggctctcttccgtgagccttattttggccattgctggaatcccgttgtgcaggacagctgggtggattgcagtgatgtttgcgcaccacgtcccgagtgccagagcagacagggtcccacctgttaccgtcttggacttccagcctccagaaccaagagagagaagaaatctctgttgctaaagccctcctccagtctgtggcttgaggttacagagccccagcaaaccatcacgctgggttaaaggaactggtccccagagctcacagctgcagactggccaccgtaggacaatccagtgggacctgggggtgcctctgggccattgggggaccctcggtgagccagtgaactcagtgcacttctggagctccctgaccacgagtgaggaaattgaacggtacaggaaaagcaggagagcgtgcaccttaaacggccaaggtccgtcactaccaccgagcacctgccaggctccccacccagtgctcccaaaagtagagggccccctccctcccctaaactctcagaggttagtatcaccgggtcaagatgatgacagcacggggaagcctctggcaagggccttgccccaggggacagctcaggtggcctcggataacatgacaaagaccttctttatttattattattattaattttttattttttttggagacagggtctcaccctgtcgcccagactggagtgcagtggtgcaatcatggctcactgcagcctcagcctcctggactcaagcaatactcctgcctcagcctcccgagcagcttggactataggtgtgcactgccacacctggcttttttttttttaatttttatttatttattattacttttttaagacagagtcttgctctgtcgcccaggctggagtgtagtggtgtgatcctgggtcattgcaacctctgcctcctgggttcaagcgattctcctgcctcagcctcctgagtagctgggattacaggcaactgccaccacgctcagctaatttttgtgttttcagtagagacggggtttcaccatgttggccaggctgatctcaaactcctgacctcaggtgatccacccgcctcgcaaagtggtgggattacaggcatgagctatcacgcccggccactaatttttttattttttagtagagacggggtcttgctgtcttgtccaggctggtctcaaactcctgggcttaagcgatcctcccgcctcagcctcccaaagtgctgggattgcaggcacaagagaccctcttttattgttgcaagatgctgacaggtttcagaagaggtttgaaccaaagcggcctcagggacccaggtggcccctgggatacgtttctcccaggccaggtttggtttcagtcggcctgagcgtgcagacacctgtctcctgggcactaaacttgacactttcagttcctatcaggcggtggggacgagggggcgggtgggagggggggaacgggctcacgtgccaggctcggggggggggaagcgtcctcaacattctcagaaaggaccacgcccggcaccggccttggatggcttccctctcgcaatctgctttctgggaagtgggcccctcgcaccgggtgcggcgcccagggttccccgccaccccgacccttactaagccgctcagcccagggatccagggccctggcgagacagcctgggagacgcagagtgggaaatgatgactgggagctggtatcgcgaatgtctacacgcagactgacttcaggggcgaggaattccgcctggcgagcgtctagactgcggtgtttctgggacgctgggagctggagccaggacaggtctcccgggagctggtctgtgctgccacctgctggtcatggcccgacaggcggcctcgctgtcaccactgagtgagctcgaggtgccccgtcccaggaccgtggcaggagggggtcccgtcctgcgtggggcttgaaggcaggtgggcaagacggtgcatagcccgaatctatttaatgatttatttgataataccatttaaaaatatctcttaggccgggtgcaatggctcacgcctgtaatcccagcacttggagaggccaaggtgggaggataacttgggctcagaaggtcgagaccagcctggccaagagagcaacaccaggtctctacaaaaaattaaaaattagccgggcatgctggcgggcgcctgtaatcccatctactcaggagaccgaggcaggagaatcgctcgaaccggggaggtggaggctgcactgagcgttgatcgcgccactgctctccagcctgggcgacagagggagattctgtctctaaaaaaataaaaagtaaaagtaaaagtaaataaaaataaaaatcttttttttttttgagatggagtctcgctctgtcaccaggctgaagtgcagtagtgtgatctcagctcactgcaacctccgcctcccgagtttaagcgattctcctgcttcagcctccccaagtagctggaactacaggcacccgccaccacgcccagctaattttagtatttttagtagagaccgggtttcaccatgttggccaggatggtctcgatctctcaacctcgtgatccgcctaccctggcctcccaaagtgctgggactacaggtgtgagccagcgcgcccggccaaatctttctttctttttaataattggattgactttggtctacggtctcccctggggccccatccttctctggggtggggccatcctgggcactgcagggtgctcagcagcatctctgacctccgcccactccatgccaggagcatcccagttgtgataaccacacgtccccaaacatcgcccagtgccccctggggggcagcatcacccacatttaaaaacagttccagggtagcagcctgcaaagaaggtgtgtctgggacctgggcatttcatatcggggtgacccagcctgggagaggggaggggcctcagtgagaagactgaagccaggaccccccccaggcaggacccaggctcccacggcacaaaagccccaggtccagggttcctggaaatgttttaaaatccagtcgacaaaagatgaataaaatacttgtgagtgtataatcatgaatccagcctggattctgtttgtctttatgccaagacaattgtaaaatacagcttagaatttttttttttttttgagaaattttttttttttttttgagagtcttgctgtgtcgcccaggcagcggtgcgatctcggctcgctgcaacttccacctcccagttcaagcaattctcctgcctgagcctcctgggtagctgggactacaggtacccaccaccacacccggctaattttgtatttttagtagagacgggttttcaccatgttggccaggatggtctcgaactcctgacctcaggtgatccgtccgcctcggcctcccaaagtgttgagattacagatgtgaacaacggtgcctggccaacgtcggacatttttagagcggaggaggtagcctaggagggcaaatgtgccccaggccctgagtgtcccaacatggccctgcagccaggtagaaccagccagggaaagggatggtgtttaagggacgtggaaaaggaattcagacaaagaatttctgatgcaagtttaacccggctggtggctgcagcctacttcctgctacaggctgcacagtctcttgctgaattagcacctacgttgaattaggtgagtttgcttgaactatacgttgaattaggtgttgaattaacacataggggggctttgggctctcagcccctcatctaaagtccattgtctcaagccactgcctcattggaagagcaggtgtctacactacctggagagggggagatcctgcattaattatttggggagaatgcaatctgtccccgctcctgctcacagtagatacaagaataaactcccgacggggcagatggcataaaccagggggacccccagctcctgggactcttcctcctctctccctccccactcagggtgtggatttcaatgtgtgcagcctcctgggacctcagtaggagagatggtcacggaatgcagagtctcttggggaatctgtggattcccctaacctgggcggggggtctcaatcaggggtgatcctgcccccaggggacactgggcaatgtctggggacatttgtggttgtcatgcctggaggtgctcccggcatggagtgggtggaggccaggacgccactcagcaccctgcagtgcccaggatggccagaccccagaggatctagccccagatgtccacagtacctagcaggagagatcctgatttaattaattggtgagggggaagatcaagggaccctggctatgccaagaaactcggactgcagcagtgtgtggatcctgaatgagaaaggtgcgaatcagacagaagctcgcagcctaaggccagcgaaggccacggccacagcgacatctaaaggccggcaagtgcaatgcagaatccacccagggaactcgggccccgcgcctacccccggggtaaagggggccagcctcgcacaggtgggtccgttgcaggcgtctgttgcgagaccacatcctcaccacccggtgaacggcactgggagcagactcaagaggctcgagaggtcccaggagggcgggaagagagttcccccagctacagcctgagcatggtcgccagaaagcaggtgcggcgactttccctagcaccctctccctgccctctgtgtacccgcaggggggccctgcacgtcgggtctcaggcacatgtgtggtgaaatgcacacaacaaaaaagctccctttccagacatccagtggcattcgtgcagccatcatctctagctagctctagaacattctcagccccccaaaaagacaccccatccctatcagctgtcacttcccatccccctccccagcccctggcacccacacatccccttcctgcctctctagactggcctgtcctggacatttcatagaaataggatgacacactgtgtggccttttggatctggcatctctcactgagtgtgacatcctcaaggggcatccaggctgcacgtggcctgggtcagagtctcgttcacggctgagtctcgttccagtgtgtggagggccacgctgtttatctatttacccacggacggacacttgggtcatttccaccttttagccattgtgaatcgtactgtatgaacatttgtggcaaggttctatttgaacacctgcttccaattcctctgggcagataactaggagcggaattgctgggtcatgtggcgactccgcgttcagccttttgaggaaccaccagactggtttccaaggcggctgccccatcttgcatcacacatcaattctcaatgccaaggcgttcctcagcttttaaacaaggcactgaggcaggaggcaggcagctgattgttgaaggtcaccccgtagccattggcagagccagaacttgcagctgtgatttgtgccgcggctcctgcccaagccctccttccctggcttcagtgctgggctgggcaaggtgtgtggaatagccccgctttctaggccactttcggggtactgggcggccactgtctggtctgaaggtgccatctgtgacactcttttttttttttttgagacggagtctcgctctgtcgcccaggctggagtgcagtggcgcgatctcggctcactgcaaactccacctcccaggttcccaccattcaggctcccccagacctccgcctccagggagccctccagaatgtccttcctcctgccttcaatgctcctccccatcctgcaggggtcggcaaggatgtcctctccttagagaccttcctggacaccacgtggcacagactctgtcctcttggtgccacctcatcctattttctttgtcttttccggttttttttttttttttttttttttttgagatagggtcttgctctgttgcccaggctggagtgcagtggtgcagtcacagctcactgcaacctcagcctcctgggctcaagtgatcctcctgcctcagcctccagagtagctggaactacaggcacccaccaccacgcctggctaatttttttgtatttttagtagacatggggtttcaccatgttagccaggatggtctcgatgtcctgacctcatgatctgcccgcctcggcctcccaaagtgctgggattacaggcatgagccaccacgcctggcccatctgtgagattctgaagagccactgctgagcaattaagctgccctctgcagtgggaaattttctttgcaaggaagcagcaaggcggaggaggcaggagggttccctaagattgtgcacccacggcagccagcaatgtgcctgacacagtgaagggcctcggcaaaggggcgcctcctgtccccttcaaatccttacgggccaccccaggatctggtgacctggaacagactcctgtatgggcctttttcccctggtgccagcagggaacagggcaggatggaaaaaacacccagtagccagtggcccactgatgtcaccaagctgcagggctgcccagcattgattaaacacagctggtgtgggccaggcatggcacctcacacctgtgatcccagtgctttgggaggctgaggcgagaggatcccttgagctcaggagttcaaaaccagcctgggcaaaatagtgagaccccatctctaatttattattattattttgagccggagtctcgctctgctgcccaggctggagtgcaatggcacgatctcgactcattgcaacctctgcctcccgtgttccagcgattctcctgcctcagcctcccgagtagctgggattacaggcgtgtgccaccgtgcccagctaatttttgtatttttagtagagatgaggttttgtcatgttagccaggctagagactccatctctattaaaaaacaaacaaagaaaggctgggtgtggtggctcatgcctataatcccagcactttgggaggccaaagcgagcggatcacctcaggtcaggagtttgagaccagcctgaccaacagggagaaaccccgtctctcctaaaaatacaaaattagccgggcatggtggcgggtgcctgtaatcccagctactcaggaggctgaggcagaattgcttgaacccgggaggcagaggttgcaggttgcagtgagccgagatcacgccatcgcactccagcctgagcaaaaccccatctcaaaaaaaaaaaccagacaaatatagctggtgggttcttgggcaaggctggtgaccagggccctaggggaggatgtttccaagagctgccaagagcagtggggcccgggttctgcccgcctcttcctctgactgtttcctcatctggggtcacgggataagtgcagctccgcctccctggtcatgcaggtgactgtgaatgaaagtgtcttggaatcagaaggttctggcatgaaagctttgcaccagccttccaccagtgtgctgcccagcacgtgactatcggaaaaactttagcttatttcagcctaattacattccgttaacccaaagtctctgacgttcagggctggatcattctctgggatggggccatcctggtgcactgcagggtgctgagtggcgtccctgacccccacccactccatgccaggagcatctccagtcgtgacaaccacagatgtccccagatatcacccagagtcccctggaggcaaacctgtcccacttaagaaccgctggcctggaccagaaactggatctttcagggaggcagagctcaccagccatccaggcactgagcccggcccagccctgcagctctgaccctgccttgggctgtgagctctgaggaccccatcaatctgatcaagaagccacactaggtcacctcagaccaaggacattctgccatgatgcttcagactgttcttctccccatcctcctctccacctccagccctcaaagacctggcctgggtcccctcccgtggctcccagacctccgcttccagggagccctccggaatgtccttcctcctgccttcaatgctcctccccatcctgcaggggttggcaaggatgtcccctccttagagaccttcctggacaccacgtggcacagactctctcctcttggtgccacctcatcctattttgtcttttcctttttattttttttttttttgagatagggtcttgctctgttgcccaggctggagtgcagtggtgcagtcacagctcaccgcaacctcagcctcctgggctcaagtgatcctcctacctcagcctccagagcagctggaactacaggtgtgcaccaccatgcccggctaattttttaaatgttttgtagagatacggtcctgctatgttgcccaggctggtctcaaactcctggcctcaagtgatcctcccacctcggcctcccaaagcgctgagattacaggcgtgactatttccttatcttctaagaccctctgtttggtttgccagtgtgtctgggcatgtgctgtctctgtgtgacacatgctccctgagaacaggacttgattccacctgtatcaggctgggcccccagcacctaggctgtccctggcacacagtgagtgtcgggtcaatatttgcgactgaccgacgggttggccttccatctactcttccactcaccagcttctccatcttgcccaaatccctgccaaccccagggcactgaggacacagattactcctcacccatgccccttgcaaagctctcagccacatttttctcttttctacctgtatgtgtgtggtgtgtgtgtgtgtgtgtgtgtgtgtgtgtgtatctcactctgttgcccaggctggagtgcagtggtgcaacctcagctcactgcaacctgcacctcccctgttcaagcgattctcctgcctcagcctcccaagtagctgggattacaggcacgtgccaccacacccacctaatttttgtattttcagtggagacggggtttcgccatgttgtccaggctggtctcgaactcctgacctcaaatgatccacccgcctcggcctcccaaagtgctgggattacagacgtgagccaccgtgcccagcctgttctattttttttttaataaacaattttatttggagtaattttagatttacaggaaagttgcaaagagagagtccccgcccacgcctcaccagcttcctcttcaggggccaccctgtgtaaccacagggcattgctcacagctggggaacgctggcaccttcctagtaaccaaatgccacagcgattcagcttccctcagttttcccctcacgacctttcctgccccattgtgaccccatccaggagcccatgtggcatctgaccgtcccatctccgtgggttcctctgggctctcagtttcttggtctttctttggtatttccatgaacttttttgtttgtctctttaagaaaacggttactatccatgaaaaacaaacaaacaaaaaatgtcattctggctaccctgagagcttataattgctattttaaaatgaatgaatacctatttgattgacattttctcagttttgatttcaaattcaacaaatatccgtaagtagaaggcatataaacaaaagctccttggaataatcgtcaggaccagagagtttgagaacctttgtcctaagccaggggttagctaactacggcccctggaccacatctagctgactgtgtgtttttgtaaataaagttttattggcacacggccacacccacttgttgacatattgcttgtggtggctttcccgctacaatggcaggcagagactgtccagcctgcaaaggctaaaacatttgccatctggatctctgcagaaaagtttgctaccccaggcctcgcacatagtaagttcatagcaagtatttgtttatagtaaggctgagccctaatcagggtgaagggcaaggtcagacatcggaggaccactgaaatgtccattctgtcccacctggtacagcaaacgccaccatggagcaggactcagccatgaaaaggaacaaggctctgatgccggccacagtgtggatggaccttgaggacatcacactctatgaaaggagccagagacagagggccacgcagtgtgtgatcccatttctacgaaatgtccaggacaggcccatccatggggacagggaggggatgcgtgtgtggcagggctgccggggggagatggggagtgactgctcatgggggacagggcttcttttgggggtgataggatgttccggaattagataaaggagatggttgcacaactctgtgaatgtaaaaaccgctgagctgcacatttttaaagggtgagttttacgctgtgtcagttatatctcaataaagctaatcctagcattttgggaggacgaggggggggcgcggatcacctgaggtcgggagttcaagaccagcctgaccaacataaagaaaccccgtctctactaaaaatacaaaattagccaggcatggtggtgcgcgcctgtattcgcagctacttgggaggctgaggcaggagaattgcttgaacccgggaggtagaggttgcaggttgcagtgagccgagatcgcgccatagcactccagcctgggcaacaagagcaaaactctgtctcaaaaacagaaaagaaaagaggagaggggaggggaggggaggggaggggaggggaggggagaggagaggaccctgtagaatgaaagaaaggcagatccccctgcaccctggctacaggccgtcgtcccgacccctctctctgcaggcaggtcactgcccccctcacaaacctctgtcctgatcccccaacccacacaccagagctgggcccatgcaccgggaaacctgccaccccaggggccactccagtctcagaccaacaggatattaaaaaaggcgaaacctcagaaccgtttcctatcgaaaccaattagaaagctcttgggtatgagtccaatgttttcaagcaactaaaggcaaaagagaagattttcaacgaaacatcccagctgggggtgagcttcttagggtcctgtcatcggccaccctagagggacctaggggtgagcttatgccgtcagcacccccagccaacgtgggtcggccagttagctgggcgtggtgttgtgcgcctgtaatcccagctacttgggaggttgaggcaggagaattgcttgaacccgggaagtggaggttgcagtgagccgaaatcgtgccattgcactctggctccgggcaacagagcaagacagctctgtgcagagaacagactcctgcggtggaaatgctggctgcctttgaggctgggttctgtgaccttgggtttcccagcctgagcttccagtttcatttataaaaggggtgacgtggccgccttcctgcaggcgctctgaaggtggcagattacacagaggtggtacgactcatacaggtttctgcaaacgggggccccatcaacagtcacctttccttagcacagcgccttcctcctggggtgacctcgccccttcctgcacaccccaggagcttcctgagacctgagtaaagctcacttcccttgcaaggggtttagtgacgtcccttcaaaattcttgtccacggggaacctcggaaaatgactgttacggactaattgcatttgcttaaaacttatgttgaagctggatgtggtggtccacacctgtggtcccagctactcgggaagctgaggcgggaggattgcttgagccctaggatttcagggctgcagtgagctatgatgctgccactgcactccagcctgtgcaacacagcagcaagactccagacacaaaaaattaattaaagaaaaatggctgggcacagtggctcactcctgtaatcccagcactttgggaggccgaggtgggcagatcacctgagataaggagttcgagaccagcctgaccaacatggacaaacctcatctctactaaaaacacaaagttagccgggcgtgttggtgcgcgcctgtaatcccagctactcgggaggctgaggcaggagaattgcttgaacctgggaggcagaggttgcagtgagccaagatggcaccactgcactccagcctgggtgacagagcaagacctcatctaaaacaaacaaacaaacaaacaaacaaaaacaaagaaggagacacagagagacagcagaaaacagaagcagagactggagcaattcgacggtaagcacaagccaggtttgccagagcccccagaagccagaggacgcggaaggatcctctcctgtagcgcccaggggagcacagctctgcagacagcttggtttagtacttctgccctccagaaccgtgagaggacacacgtctgcggattgatacttccgggtctgtggtcacctgttatggcagccacaagaggctcgtctgccccttttctctccccttccttcatgctgatcaccacggaggagtgagttcgattccctctgcctgcccaaaaccctcatcaactttttttttttttctctctcttttgagacggagtcttgctctgtcacccaggctggagtgcagtggcgagatctcggctcactgcaagctctgcctcccgggttcacgccattctcctgcctcagcctcctgagtagctgggactacaggcgcccgccaccacacccggctaattttttgtattttcagtagagacggggtttcaccatgttagccaggatggtctcgatctcctgaccttgtgatccgcctgtgtcggcctcccaaagtgctgggattacaggcatgagccaccgcgcccggctcctggtggtttttaagcttgcaaagggtgcgggataagccctgcagaagtcaatggtcagtaatgagggctggggattcagcccatctccagggaaagcccccgaaactggcaacaccagctgcttccgggaaggggaacccaatgcgagcaacgcggcagagagggggcttccgggaaggggaacccaacgcgagcaacgcggcagagaggggggcttccgggaaggggaacccaacgcgagcaacgcggcagagaggggggcttccgggaaggggaacccaacgcgagcaacgcggcagatagggggcttccgggaaggggaacccaatgcgagcaacgcggcagagagggaggcttccgggatggggaacccaatgcgagcaacgcggcagagagggaggcttccgggatggggaacccaatgcgagcaacgcggcagagagggggcttccgggaaagggagctcaatgcgagagcaacgtggcagagaggagggctttgttttcactttcaccgtgtatcatttataccactagagctctgacaccccgggcacggccactgatagaaaacattggtccttcttcctgggggtgtgtggccaagtgagggtgggtgagggagaagccactttccggctaaggtcctcaacacccaggctcagtctgagctcttctgtgtcccaggaggcaaaaaggtgaccacaggttgggctgtagtatcaaacccagaacaaacggggtgttccaagcctgggcaacatagccagaccccatctctacaaaaaaataattagccaggcgtggtggtgcacctgtagtcccagctactttggaggctgagatgggaggatcgcttgagcatgggcatttgaggctgcagtgagctgtgatcgtgccactgcactccagcctgggcaacagagcaagaccaggtctcaagaaaacaaataaacaaggtgttccttacccaaaggaattgcaaggaggggctcggacagatacttgtactgttcactcatgttcacagcacccaaaaggtggaagcaatcaatccaagcgtccatcaacagatggacagataaacagcatggtgcatctgtatgatggaatattactcagccatgaaaaggaagggaatcccaacacaggctgcaacacggatgcaccttgaggacgtcacgctcagtgagagaacccagacacaaaaaaccaaattggccaggtgtggtggctcacgcctttaatcccagcactttgggaggccaaggcaggtggatcacttgaggtcaggagttggagaccagcctgggcaatgtggtgaaaccccatctctactaaaaatacaaaaattagccgggcatagtggcaggtgcctgtaattccagctactcaggaggctgaagcaggagaattgcttgaatctgggaggcggaggttgcagtgagccgaggtcgcaccgctgcactccagcctgggccacagagcgagactgcatctaaaagaaaaggacaaatcttgtgtgactgcacgcctaggaggtccctagagccgtcagattcacagagacagtccatctgttgatggacgcttgagttgcttccaccttttggctgctgtgaacatgagcgaacagtacaagggaagcaggatggggggtgccaagggctgggaaggggacggggagcaagtgtttcacggggacagagattcagtctgggaagatggaaagttctggagatgacggtggtgatgggtgcagcaccatgcaaatgtgcttaatgccactgaactgagcccttagaaatggctaagatggtaaatactatgtttcatatattttaccacaattaaaaaaagaaagaaagggccgggcgcggtggctcacgcctgtaatcccagcactttgggaggccgaggtggaaggatcacgaggtcaggagatcgagaccatcctggctaacatggtgaaaccccgtctccaataaaaatacaaaaaaaattagccgggcgtggtggtgggcgcctgtagtcccagctactccggaggctgaggcaggagaatggcgagaacccgggaggcggagcttgcagtgagccgagattgtgccacttaactccagcctgggagacagcgagactccgtctcaaaaaaaaaaaaaaaaaagaaaaagaaaaaaagaaaagaaagaaagaaaggtgctccagtggctctcaggcagagctccacctctgtctggttgccggtggtgccacagcacagcaggcctctcgtctccggagcagtgactgtgacctgttgccagccctggcggctattcctagcagctcctgacctgcaggaggctgagcccagcagtgccttctgggaaggagggaaggagggaggctttctggtaattacccccaggcagagggcaggcgggcacaggggcccgagcccctccagcccatcccacaggctccagggtgtttactgagcttgcagaattccacgctgtgggctgggccactcctgccctgagacaggaagacaaggtcagctcagggcacagaagccatctcctggctgtcacctttccttgtgggtgcagagccggaccccaggcaggggtggacgcctgtggtttacctccctgggggctcgggccctgtgccgagggtgcatgtgttgtcccctggggcctctagacctcttcctttcttttgagacaagatcttgctctgtcgccaggctggagtgcagtggtgcgatctcagctcactgcaacctccgcctcccgggttcaagcaatcctcctgcctcagcctcccgaatagctgggaatacaggtgcacaccactgcacccggctaatttttaaaaatttttttgtagacaagggggtctcactcttttactgagcctggtcctgaatcctggcctcaagcaattctctcacttcagcaccccaaagcactgggattataggtgtgagccactgtgcccagccagggtttttatttttattttttgcagaaatagaggggggtctctgttgcccaggctggtctcaaactcccggcctcaagcgatcttcccatgtcggcctctgaaagtgctgggattacaggcgtgagccactgctcccagattagccagacttctctcttctcctcggtcacggggatcaggaagcagagaaccaaggttctgccaccaacttgtagaagggccatgggtcacccatgcccctcccagtgtttccatggttgccagggaagccagtgaagggcagagtctttggggaggaggaagctgggtcagagaggagatgagggtgtgagagggtgagcaggtagcgccctcaccgtgctgggcacaagacaaggacttcagagctgattattttggttttggggttttttgtttgtttttgtttttgttttgtttttgaggcggagtctcactctgtcgcccaggctggactgctcactgatgctcaccgcaactccgcctcccgggttcaagcgattctcctgcctcagcctcccaagtagctaggattacaggcgcccaccaccacgcctggctaatttttgtatttttagtagagatggggtttcactatgttggccaggctggtctcgaactcctgacctcaggtgatccacccgcctcggcctcccaaagtgctgggatgacaggcgtgagccatggcgcccggcctgattatttcatttactccctgcagcaaccctggactgcaggggtggtgatcaccccccattttaccaaacagaagcagagagtgaccgcgggtgcccacctgaccccgtgtctccagcgggaacgtgaagctgatgctgctcccgccccaggcctgaagccggccccctgccccaaaccagcctgaccagcggcaccgtggaaacccaccgggatctctgccacccacaggaggctggggcatctctcaccccctctgtgcctcagtttcctaatctgtcacacagggaggctggacccaaaccaattgattgttgtcatgggtggagccggaacccgctatggctccctcctgccctcgggataaaatgcagcctctgccgtgcggcctcctcactccctccctctcaccttttcaaggtcctggaaccatctctgcacctgtatcccccaccccacctgtcaccttcagggcactagcaacactcaactcatgtcacttcctccaggaagccctccctgaattcccgaacaaagctcctggtgtgggcacctgctttcactcttgggcggtgttgtcttcatcggttcactcaatcagggtctcaactggggtaattctgtcccctcaggggacactgggcggtgtcgggggacatctgtaattgtcatgacggagggaagtgggaccttccctgactaatattccctcacatcggtccatgctcctggcatggagtgggtggaggccagggatgctgctcagcaccctgcagtgcccaggacggcctcaccccagagaacagtccagtgtcagtgtccacagtgcccagggggagagacctgctttaattatttgggaataaactgagtgtcctccctactcacaccagacactggaataaactccagatggagcagacggcataaacccgggagccccagctcctgggactcatctcctctctctcttcccactcaggtgtggatttcaatgtgtgcagcctcctgggacctccgcagggcagaggatcatgggatgcagaatctcttggggtctgtggaatcttctatcccagagggtctcaaccaaggtgtttctgtcccaggggacgctgggtgatgtctggggatatttgtggttgtcatgactgggggtgctcctggcatggagttggtggaggccagggacactgtcagcaccctgcagtgcccaggatgacccaccccagagaacgatccacctcacatgttaaatggcggtaagggggtgaacccaccccctgcatggctccaggggcacccagagtggggccccagccctgtggccgcctctcctcccacttcctccgggcgcctgtcctctgcacctgcatcctctggccctggctcccttcagagctggtcacagctggcagcccgcgtgctgtaaacacccacccaggcgtgccagccagacctggctttctgtcactcccggctgattctgaattcccagtctcacatgggccagagggtgactggctcgagacttgcctctcattacgagcaaagctctgattcagccggaatattagtcagggtacagcatgtcacattccaggaggctgatcagctccgacctcaacaccggcagctgactcagcccggggagttgcatgtgctgactactccttctgagcctcacagttatgttctcgagatttcactcagtgtcctatggtgtcactggtcctggtcgcagacacagactcacctgtgtgcaggaggtcaggtgaggatcggtcccagcaccttcattctttgtttctttcactcactcagtaaacatctggtgaagacttggaccagatccctgatcttaatgaaggaggtgacggtccggcccaggtgacaggcacagttaatgtgatgatcacaacacagttgccatgtgaccctgggcacgtcagcccctctcagctactgttttctcctatgtgaagtggagatcattatctcaatctcaacatggcaaacaacacggcaagtgtatgagtcagctactgctgagtaacaacagcggcaacaaagacaccatttgccatctcacaacttctgtgtgtcaagagtctggcttaactgggtcccccgctcagagtcttataagcctaaaatcaaggtatgggctgggccgagttgtcatctggaatttggggtcctcttctgagctagtttggttatcggcagaattcatttccttgcagctctaggaatgaggtccctgtttacctactggctgttggatgtgagtgctctgagcccctagaggctactctcaggtgtctgccacatggaccctccacaggcagctcacgacatagctgtttgctttctttaaggcaagaaaccccttccctttctctctttctttcaactgtggtgtgtgtgtgtgtgtgtatatatatatataacataagacggatcatcttaaccacgtttatgtgtacggttcagtgatgttaagtatactcacactgctgtgcaatggctctccagaaccttccatcttgtaaaactgagacactgtatccactgaacaacagctcccctcttccctcccccagcccctagcacccaccattctcccttctgtctctctgaatttgacacctcgggatgtgcttctggtctcttttatgggctcacctgatgaggtcaggcccacccaggatgtctcctttttgatgagctcaggtcaactgactaggaatcttcgtcgcatctgcaaaatccctttaccgaacacacgacctaactgcattaacctaaccactggagtgacaccccatcgtattcgcaggtccagcccatcctcaagtgcaggggattagataagatgtgggcaccaggcggtgggggtcttgggcgccatcttggaattctgcctaggactgtagctgtaaaagacatggtggccattgctgctgtaggtgccattagtaggaaacacacacaaagtggcccccaaggagcacgtactatgcatcaggctctgtgcaaggcacagagaaaacagcaaagaactttggggaaagttgaagacttgaggtgaacaactggatatcttagtaggtctctctgaaggttgagcaaatggataggggatattgggagatgggttatgtcccttggaaagaactccaaatgtccctttcaataactttccactctaccagtcatctcctccttccagaaattctcaggaggcagcgcttggtggctcttctgcagatgccaggatggtgacggtgacagcaggccacgctcttgtgtttagaataggaggtccccaaggacacagagtcacagacgggtcaggtaagttgcctgggcgcccacacgaataggaggtgcttctggatttgaaacaagtcttctagtgctaggagccccagaacacacctagtgccaccccctccccacgacaaagcccaccagaagggctggctgcctaaagaggtagtggacaagacctcacagactcacagactagtgggagaagacagaagagcgtagccctgaacgcagtgtgggggcacacggtgattggaacctggcacccacatcaacggtcaaagtctagatggttttgtttggttgtactcccgcctccctctgaccccatgcccacgagtaagaggagctccgtccacatttatggacacttaatgttcctgcacacccataaataaggtgaagccgagtctgcatgtgtgcgaaagggcacagagctttgcacatacatggtgccagggtccatttcctggttttgtactatggttacgtaagatgtcaccactgggggaaactgtgaagatacatgtgatgttttttgctctgtgtgatttttgcaacttcctctgaatctgtaatgatttcaaaataaaggttgttttttttttttaataagtggagacacatttaggtgtaactgggacacagcctgccacctactttccaaatgcctcctttctcccaataacccccaccctctccccaaagacctggcagtactcctgcaagaggaagggatggacgccagaaaaagggagtgaaggtcctgctgattcggtcctggctgaggccgaacgcaggcccccccttccctttgccaccaagaggagtctaagatctccctggagaacatatcttgtagaaccccctccccttgagtgtgggcagggcccgtggacatgatgagatatcactcccctgattaggttgcttttcaggaaagaagggattttgaagaggtaaataaggtcctaaatcagttgaccttgagttcactgaaagggcgattatcctaggtgggcctggtctaatcaggtgaccctttaaaagggattgggcctttcctgaaatgagagcctggaagcatgaggggcctatggagaaggccaagtggcctgagagtggcctcaaagagctgagagttgccccctcctgacagctaacaacgcaacagaaacagtctatcaaccacaaagaactgaattctgaatgagcctggaatgagcttggaaggggatccgtcaccacacaaaccttcggatgagaatgcagccctggctcacatctccgaggtcagaagtttggacatagtgtggctgggtcctctgtgcagggtcttacccagccacactacatccaaacttctgacctatggaaccatgagataataaatgggtgtcactctaagctactgcattcatggtagttgttacgcagccatagctagctaatacactctttatgtgctgcagactagagcattctgggattttatggtcagctttcaaacttattcatacacaagggtttggacatcatgtccctccacaatcagccaagcaactcagcagtttcctcctgagtatgtctgagtatatcatcaaaaaggtctaatgactatgacattatctgattgtctcaacagcactgtgtggggctgaggaggcatagcaggcatgaagaccagaggaagaatggtgcatttagtattagacagcttgacatgcattaaccccttgagaggcaggcactgcctattctcccccctttcacagacgagggcattgaggttcagaaaagcacagagatggcccagggtcacagagccagtaggtggcagagttgggagcccaagccctaaactgctggttatgtcacctcatgaagccacttaacctcgctaggtctcagcatccttatctgtccagtgacgatcattctttcctcacgagtggttatgagatgaaatcagataactcaaggcctctaggctgagggtcagcaaaccttttctgcaaaaggccactgagctctgtccttgtagtatgaaagcagtcactgatgacaggtaaatgaatgtctgtggccgtgtgccaataaaactttattcataaaaacaggaagtggaacagagaacttggcccagggacctgcagtatgtctgtggctgtgtgccaataaaactttatttatacaaacagggagtggaggggggaacttggcccagggagctgcagtttgtctgtggctgtgtgccaataaaacttcatttataaaaacaggaagtggagggccagactgggcctggggtgggggcacagcatgtctgtggctgtatgccaataaaactttatttataaaaacaggaactagatgggggacttggcctgggggccacagttttcgaccccggctttagcagttttttccttcttttgctaacttctaaaatgaagccgactgaccctagaagtgccatttctgaaagaggaagagagaaaaggggtgaaaggacgttgaaccagccaaggcagactacagcattttcagggcgtctccccaagatctccaataaggacaactagcatcgactaggctaatcccgtgacggcctgttctgcggggacatcatcaccctggtgctgccctctcccccattctctagagaaaggagccccaaaagaacagataaactctgcctcctagaaaggtaagactcctggcctggcgctgtgtgggatcatgcctgtaatcccagcactttgggaggcagaggcaggtggatcacttgaggtcaggagttcgagaccagcctgaccaacatggtgaaacccgtctctactaaaaatacaaaaattagccaggcgtggtgtcaggcacctgtaatcccagctacttgggaggctgaggcaggagaattgcttgaacccgggaggtggaggttgcagtgagccgagattatgctattgcattctagcctgggagacaagagtgaaactccatctcaaaaaaaaaaaaaacaaaaaaacccaacctgctataaacaaaactcacacacacacacacacacacacacacacacacacacgcacacagaaaacagactgggaattgtaaaaacagctgacgaacagagactttctactctacagggaagtctctcaccgtcagcactgtggacatcgggactggatccatctctggggtgaggctgccctggcactgcagggtgctgagcagagtccctggcctccacccactccctgccaggagcaccccttagttacactgagctatgatcgcaccactgcactcgcacctgggcaacagagtgagactctgactctaaaataataataataacaagaatataagaataataattcagatccatgtccgataaaaataataaataagtaaagctgaggctctaacatgaagtcattacgaggctcatccagccacagtgggctctgcactggggcacccgcctgggcctctgcctggcccatgtctgctcaggagccctcagccccttgaaccctgctggtgggacagggggcccctctaccaggcccctaacttctcaacagaccccaccttgggcctccccaggctgcaccttaaccatctatgacacgcatccccaggcggcaccgggagtgtctgcgcagagatccgagggtgttagcctggcaggggccctgcaggtgggtgctggttcactaaaacgatgaagcggatgggaggaaaattagcatccaacgggcctcatcattgctgtcctgggcaatggactctgacccctgctgtagagggtcagagagggtcaaggtcaagccacagattggcagagccatcctctctggcctccactcggctcccccatgtcccctgcccccagcatctcatcatatgcgactgtcaccgccgtgtgtattttgagtcaaaggcggccaaggctcgatgaatctgccgatgaccaagttggtgcctcatccctcgttctgtgggaggctgactgttcaagcggttgcttagcaacaggcgcgcgcgcgcgcgcgcacacacacacacacacacacacacacacacacacacgagaggtggctgtggtctgcacactgggctggggtactcagatccccgggctcggtggtcgtggatgtgagcctctctgggtatggagcctcaatcagtagagtcaggtggtcgcaataacagctctgaaacggggattcattgagaggacatcggtgggcttgaaaacgggtgtctgtttaccggggcttgagtgggagctgtagtaattctgtccagaagaggacagaagcctgctctcaactcacccgggaggcaggttcttctgcaccgggccttctccccccggcactgtgggcatttggggctgaatcattcttggttgtggggctgccccgggcactgcagggtgctgagtggcacccctgacctccaccccatggcatccaccaatcgaggcagccacaaatgtctcctgggtgcaaaattgccccgagttgagaccccctgggataggggattccacggacccccaagagactccgcgtcccatgatcctctgccctgctgaggtccccggaggctgcacacattgaaatccacaccctgagtgaggagggagagaggaggtgagtcccaggagctgggggtcctcctggtttacaccgtctgccccactgggcgtttatggtgcctatcatgagcaggaaaataactcgaatttttttccccaaaataatgaacccagagtttctccccctcagcactgtggacatttgaggcccgattgttctctggggtggggccgtcctgggcactgcggggtgctgagcagtatccctggcctccacccactccatgccaggagctcccccaagtcgcgaaaaccacagatgtcccagaaattgctcagtgtccccggggttgggggtggggggcggcatcacccagatgacccctgctatagagggtcaaggtcatgtccaagctctcctaccgccgggaagcactgccttgtcctgggctacagatgtggaggctgctgggtacagggagaggtttctgagtcctggagactgtggcagagcccctgatttcggcacagcgccccgtaattacttgcgggctgcacacacgttttctctcggggagggtggtagcaatgagctgtgaccttccgggagcagagcgttttcaggctctggctgtatatcttggcaattctttcaggggaacaacttgtccgcgaaaagaactgataataacgtgaatttcaacacgaccaggacatgctgaaatctggtgaccgaccagggggaaataaacccgctctgactggccgcggggactggagtttgcttaccacacaagagcccttctcaggataagaggctccagtaaagctctcagcagaaatgttaccaaaaaaaaaaaaccctcgccgggagaacaaggagctaccagaaaaacacactcggtgatctggaggtcgcaaagttcttccgcactcagtgaggcaagaagcaaaaaggctgaagaaatgcttatcctggaagaggggttctcacccgggttctgtggacatcggagccggattgttctctggggtggggtcgtcctgggcactgcaggctgctgagcagcgtcccgggcctccacccactccatgccaggggcaccccccagtcgtgtaaccacaaatatccccagacattgccccagatgagtgaggacagaggtgcaggtgggtgcaggtgggcacaggtgggtgcaggtgccccgtgaacccatctccatctgcaccctctgcatctccaaccccacccccagccccagtgtctcctaaggggtagaaagtcttcagtgctgaatgtgagagaccctgccttaatttgagggaaaaaaaagtaatcaagtctgtcccctgctcacatcagacaccacgacaaactcccaatggagcagacggtgtaagacagggggaccccagctcctgggatttgcctcttctctccctcctcactcggagtgtggatttcagtgtgtgcagcctcctggaacctcagaggtccatatgatcatgggacacacctgagacccaggaggtctcaacttggggtgattttttttttttttgagacggagtctcgctgtattgcccaggctgtagtgcaatggtgcaatctcggctcactgcaacctctgcctcccaggttcaattgattctcctgcctcagcctacggagtagctgggattgcaggcgcccgccaccacacccagctaatttttgtatttttagtacagaggagttttcaccatgttggccaggatggtctcgaactcctgacctcaagtgatccgcccacctcagcctcccaaagtgctgggattacaggtgtgagccaccgtgcctggccaacttggggtgattctgtcccctaagggacactgagtgatatttggggacatttgtggttgtcacaactggcgggtgcacctggcatggagtgggtggaggcccgggacgctgctcagcagcctgcagtgcccaggacagccccaccccagagaaaaatgtggccccaatgtctacaggagccagggggagagagaccctgtgttatttggaaaaaaacagagtctgctctctgctcacaccggacaccagaataaactcccaaaggggcagacagcataaatcagggtaactccagctcctgggattcacctcctctctccctcccactcagggggtggatggaattctcctctggccaaactgaaccagctctctactgccttcactcaggggcgcacgagtctctaactcacaggcgaggatccaggccctctgcccgccaggacaatgacccctctctgagctggggagtggcagccccaggtccacagccagttctcaccctgaggagcatgacatctgggaggggggatgacaggcaccccagggcctgatggtggggacaagccagggtctgattcccatggcaggatgacctgcactctcccagggccacccagccctccagggatgctttatgccttccattctctggtccgagctctgctctggagacacctctgtgcccgagtgtgaggtgcattccctgactgccttaaggccactcctggggagcagagccagtgcctcccgcctcctgccacgcacaacacccagggaccgcctctggttttgggcagagaggctctgagtgtgcccacaggggcccctagggcaggggccaaccatctgggtttgcctgggacttagggctgtcagtgttgaaccaggaaggtatcaagcaaactgcagtgggggtagtgacagagcttaaagaggggctcgggggtgactgaagacatctgggatacagtcagtatgcactgcctgcacctccatccccacctgcacccacctgaacccaactacgcacacctgcgcccatctgcacctccgtccccacttgtgcccacctgcgcccacctgcacttccgtccccacctgcacctctgtccccacctgcacctccaactccacttgtcctcacctgcacccacctgcacacccactgcacccccgtccctacctgcaccccccgcatctccagccccctgccggctccaggcccggggccaggaaactccgtgggcctcctctgccccctcgtggccgccagcggtaacagcagccctctgcaaatcgagcttcagaggccccaggaacaggctccccccgcccccgagcccggcccgtctttgctgttgtcgttgttgttttgccctggggcctgcagaaggataggagcaggggatcacggtgctggttttgtcatcaggacaggcagccacggccctcacttggcggcgcacctgctctcctggagaggctgccacccagaggtcagagacccccgcaggcgcctgcacccctcacagcctcgctctcctccccgtccgtccttgtagggaggtgagtttccaagcttcccaccctgtgcccgcaggagccaaagccgcactcgcccagcccagcgcccagcaaacaggaggtgctcaatgaatgactagcaacattattaaaagatcaggaaaagcccgcatcccacgccaccctttgtaacagagaaccccttcaaggtcagccggcaccacacctgctcaccactaattccgtcccctctactggggcctccccttgcgtgtgtggacatcagagcctgatgattctctggggtggggccgtcctgggcaccatagggtgctgagcagcgtccctggcctccatccactccatgccaggagcatccctccatcatgacaattacagatgtcccctggaggcagaatcacccctggttgagaccccccgggttaggggattccacggacccccaagagactccgcgtcccatgatcctctgccatgctgaggtcccaggaggctgcacacattgaaatccacaccctgagttgggagggagagaggagatgaatcccaggagctgggggtccccctgatttacaccatctgccccatcgggagtttattctggtgtccagtgtgagcagggactgaagtcagttttgaaataatgaatgggccgggtgcggtggctcacgcctgtcaccccagcactttgggaggccgaggcaggtggatcacgaggtcaggagttcaagaccagcctggctaacatggtgaaaccctgtctctactaaatatacaaaagttagccgggcgtggtggcatgcacctgtaatcccagctactcgggaggccgaggcagagaattacttgagcctgggaggcagaggttgcagtgagctgagatcatgccactgcactccagcctgggtgacagagcgagactctgtcagaaagagaaaagaaaagaaaaggggaagagaaggggatgggaagggaaagggggaggggaaggggaaggaggggaaggggagggggaggggagggggagggaaaggggaggggaaggggaggggaaggggaggggaggggaatggaaggggaggggaggggaagggaagagggaggggaggagaagggaagggggaggggaggggaagggaagggagaaagaaagagtctctccctcctgggcactgtagacattggggctggatgattctcttggatggggccatgttgagcagtgtccctgacctccaaccactcatgccaggagcaccccccagtcgtgacaaccagagacatccctagacatctcccagcatcccctggggaggggaggggaggggagggttgggtcagaatcacccctgcttcctccgtgagccccactagcatagttaaatttcaagtagttcagaatttaagtgtaaaacatgcaatcggaacaaaatacaggtgatttttttataatcttaaaatttggaagagatccataaaaaaaacaaaggagatgctcatgtataacaaacatttaaaatcctggccaggtgcggtggctcacacctgtatcccagcattttgggaggctgaggcagaaggatcacttgaggtcaggggttcgacaccagcctggccaacatggtgaaaccccatctctactaaaaatacaaaaattagctgggcatggtggcgaacacctgcaatcccagcttgggaggctgaggcgggagaatcgcttgaacccggaaggaggaggtggcagtgaaccaagatcgcgccactgcactccagcctggacaacagagtgagactctgtcaaaaaaaaaaaaaattcctctttggcaaaacccaccgtaagcaaagtcaaaagacacgctcaggaaaatatttgcagagttcaaacaaacgtttataaactgttcaaacaaatcaatgcgcctgagacgccggaacagaaaggtcagcaaagaccccagcctggcagcccacagaaggatgcccagagaacggtcggattcaccggccaccaaggacacccaaacaaaacaaagatgagcgcccctacttgccagcttggcaaagatttcacagctgcggctgggagggtggggaacgagcgctccaggaaggaatggggtgtttctggaggtttttgtggctggatgtcaaatgtagatggcaggcacagagctcagcagcacatccactcgcaggaatttaacttaaacctcaaccatccaaggggagggattcaggaaggaaggagagagggagggaggcagggagtgggggaggagggggggaagggagggaagggagagaaggagggagggagggggaggaaggaggggggaagggggaagaagggagggaaggagagggtaagggagggaaggagagggtaagggagggagggagggaaggagggagggaaggaaggaaggggagggagaaaggaaggaaggagggagggagagagggaaggagggagggagaaaggaaggagggagtgaaggaagaaaggaaggagggagagaggaaggagggaaggaaggaggggggagggagggaaggaagaaagaagagagggagggaaggagggagggggagggaggaagggagggaaggaagaaaggaaggaaggagggagggagagagggaaggagggagggaggaaggaaggagggagggaaggagggagggaggggaggagggagggaggagggagggaaggaagcggcagagggagggagatagagataggaaggaaggagagagaagggggagagggaggaaggcgagagaaagagagagggagaaggaaagaaagagagaggaaggaaggagagagagaggaagagagaaagaaagacatcaagaaaaagagagacattccaaaagcccagctagggggaccagttaaacacattataaaatcatttttaaagtgataagtcaccaccccctatcacacagagtgccttaacgagcgtcaagaatgagggtggatgtcgaggtttctcgacaaggaaagatgcccagtgatgggaatgaggaatgagagaatagaaccctccttgtgtgaaatctacaggtgaatgtaattcacgaaaatcccagcacaggcttggcaagatgctgaggcccatcggtgctgggctggggaacttaggggcttggccttctttgtacttttcttcattttacctttttagctgttgctttttttggagacagggtcttgccctgttgcccaggctggagtgcagtggtgtgatctcggctcactgcaccactcgatctcctaggctcaagtgatcctcctgcctcagcctccagtgtagctgggaccacaggtacacactgtaacacccagctaattgtttaatttttttgtagagatggggtcttgctatgttgcccaggctagtctcacactcctgggctcaagccatcctcccgccttggcctcccaaagtgctgcgatgacaggcgtgagccaccacacccaggctctcaccaagttctgacgtcaatcagggatcaaagggcttcaggccaaactgccatccctaaaatgacctgcttgagaaacttaagtctatgaaatgaaggggaggcactccagaaactggcagatggtccccagaggtggtacaagaagaagggactcgggtcccgcagctgaccctcagtggctcttagcctcgagaactcagccctgcgatggccagagttgcgcccggcagatccccacggggagcctcttcctctctccttgaggtcacaggcaggtgagtgaccaggcaagggaggaagtcggctctgctcacccctccagcccattccccatgtcagcagaaggaacagcaggctcccagcgacagccccatcctaaccccagaagccgtggacaggtcagctccatgtcaaaagggaccgcagatgggatgaagttaaggatcgtgagataggatagcatccggggtgatctgggggccccaatgtcctcatagcgtcctcaggagaagaggcaggagggtgagagtcaaacagagactggaagaggcttcactgtggctgtgaagggggaggagggggccccgagccaagggatgtgggtgcctctagacgctgggaaatgcgggaaccagattttcccctggagccccaaggagggactggcctgcccacaccttgattttccatgattttagcccagtgaggcctatgttagacttcttttttttttattttttctttttttgagatggagtctcactctgtcgcccaggctggagtgcagtggcgtgatcttggctctgcaacctccgcctcccgggctcaagcgattttcctgcctcagcctcctgagtggctgggactacagatgcacaccaccacacctggctggttttttttgtatttttagtagagatggggtttcaccatgttagccaggatggtctcaaactcctgacctcaggtgatccgcccacctcgacctcccaaagtgctgggattacaggagtgagccaccgcgcctggccctacgttagacttctgagcttcagcgctgtcagataataactgtgtgggagaagccgttctacatcagtagtcacttgttacgtctggggcaggaggtgcctacatccaccagtgcccaaagaggatctagcagctccgatccaggccctcggggcttagtgggcagccccaccagcccacagcctgcctgccagggagctgttctcacagacccccaccatgggacacgtgtttctgggacaggtcatggagaacgatgaccccatcacgggcagtctttccaaaagggcccacgggagatcagaaatcgcaatgtttcttgctgagaattgccgtatcctagcttgcaaacactattagctccgcagctgctagcgtttccctgtcgaaatgaatggggttatttgtttctgttttttagacagggtctggctctgttgcccaggttggagtgcagtggtgcaatcatagcccactgcagcctcgacctccggggctcaagcgatcctcccacctcagcctcttcagtagctgggatttcaggtgtgcaccaccacgcctggctaatttctgtattttttgtagagatggggtttcaccatgttgcctgggctggtctcaaactctcaggctcaaacgatcctccccacttcagccccccactagcagggactacaggtgcgtgccaccatacctgtctaattttctgtagagtttaggatatcgctctgttgaccaggctgatctcaaactcctgggctcaagccatcctcctgccttggcctctcaaagtgctgggattacaggcgtgagccatggcgcccggccagaactgaatgtttgaagaagcccaacaccaaacctgtggcagccccaggaagcaccgggaatgcatagtctgagccctctccgggctctgcacaccttcccgccctgcaccatgtgcaccggaaatgcaggagacctctccgggctctgcacaccttctggccctgccgtcggcacccgaaatgcaaagtctgcgccctctccgggctctacacaccttcccgccctgcaccatgtgcaccagaaatgcaaagtctgagccctctccgggctctgcacacctttccgccttgcgccattggcaccggaaatgctaagtctgagccctctccgggctctgcacaccttcccaccctgcaccatgtgcaccagaaatgcaaagtcggagacctctccgggctctgcacaccttccggccttgcactgtccgcactggaaatgcaaagtctgagcctctccgggctctgcacaccttcccgccctgcaccatgtgcaccggaaatgcaaagtccgagacctccccggactctgcacaccttccggcccggctccgtcggcaccggaaatgcaaagtctgagcctctccgggctctgcacaccttccggccctgcaccatgtccactggaaatgcaaagtccgagacctctccggactctgcacaccttccggcccggctccgtcggcaccggaaatgcaaagtctgagcctctccgggctctgcacaccttccggccctgcaccatgtccactggaaatgcaaagtccgagacctctccggactctgcacaccttccggcccggctccgtcggcaccggaaatgcaaagtccgagacctctccgggctctgcacaccttccagccctgcgcctcctttttcgggctgagcttttctgttggtgtcacagcttcactggggtgcagttacacaccctgcgatgcacactgggcacgctaatcttcaagcgcacatggttctaagggttgccattcatttctacagctatgcaaccatcagcataatctcaatgggacgctgtcatcgactcccagagctgccccgatcccaaccccccagcctccaggcgacctctgatctgtcaccttttctagaattttcctgtaagtggaattgtacaatatgaagtcctttacatttttatgtttggcttcataaataaatattatacatatattttatatctacactttttgcatctacactttattttattttattatttctgagatggagtctcgctctgtcgcccaggctggagtgcagtggcgcaatctcagctcactgcaacctccgtctcccgcgttcaagcaatcctcccacctcagccccccaagtagctgggattacaggtgcctaacaccacacctggctaatttttgtatttttagtagaaacggggtttcgccatgttggccaggctagtctcaaactcctgacctcaggtgatccacctgccttggcctcccaaagtgctgggattacaggtgtgagccactgcacccggcctacactttatatatatatatatatatatatatatatatatatatatatatatatatatataatgctctatctatacatgcatcatgttattgagatgtaattcatatgacatacagtgcacccatttaaaatgcataattctttctgagtattatctgcggcaccaaaaagaagaaaaaaatcataaaataaaaagaaaacgcacaattcaatggcatttagtacattcagagtcctgcaaccatcaccactaattccagaacattctaattatgccaagaagaagaaacccatcaaccatcacttcccatgcccctcccagtctcggcacccacgcatcccctccctgcctctgtggatcggcccgtcctgaaccttttgtagaaaggggatcacatgctgtgtggccttttgtgtctggcatctcttactgagcgtgacgtcctcaaggtacatccacactgtggcctgtgtcaaagcttcattccttttcatggctgagtaacactccatggtgtggatggaggatgttctgctgatccattcacccattgatggacatttggagtctttgccttattgctaaatttgaacatattcttgacttttgagtacatctgtttctgaattacctctcatgaccattgactactaaggatgagaccaaaatgatttatactgggcttagctaaaatatgcatttttaaggtacacattacatgccataaaattcaagtgaagtgtactgctcaaagatacttcagggccgggtgcaatggtacgcacctgtaatcctggcactttgggaagtcaaagcaggaagatcacttgagccacggagttcaagaccagcctgggcaacaaagcaaaccctaactcttttctgtttttctttctttctttcttttctctctctctctctcttttttttttttttagaaggagtttcgctctgtcacccaggctggagcgcagtggcatgatcttggctcactgcaaccaccatctcccaggctcaagtgattctcgcacctcagcctcccgagtagcttggactctaggcacctgccaccacgcctggctgattttcctatttttagtagagatggggtttcaccatgttggtcaggctggtctggaactcctgacctcaggtgatccacccatctcggcctcccaaagtgctgggattacaggcatgagccaccatgcctggccaaaaccctaactcttaaaaaaaaattttgttttaagatttttaagtaagttcaccaggttgcggtcaccccgacccgaccatcgggtccatttccacgtccctggcaagtctctggtgcacattcatgtccccagcctccaatcaccacgagtccctttctgtccctatggctttgccttttctggacatttctgccttcctttctacttatttttaaatggtttcctcttcctacattttaaaagccactcatgattctctagggagaaaaacgaggagtaaatcaacagaggagagctaaagggccagcgacgggtcactctccaggtgcacaggagatacgggtgaaggctccttaaaactccctaccatggcacgaagacaccggaaaggcatgcagcaccgctgtgggcttcccaccctgaccccatccaggggctccggcaccagcaggaccagtgagtgccacgttccctgcctcgtgggcgggaaactctgccaggagctagcagctgttacccacacctgctccccattacccatacttggtggatacaaacagccgacagacccaggtcaaggccaagacgcccgccttgacggcaaccccacgtcttacatccagggtgcaaaacagccaactgaacctcaaatcataacaaagaaatgcattacagcaccgacctgtgcaggaggtctcgccgtctgcagcaccgagatcccgaaaccaagctccactccctggaaaaaacacatagagttagtttggcgtggcttggctggaggcaccatgcatgtgttgatggggtcagcattggagaacggcctcgcgcttgtgattggacaaggacagaaatcattttggcaaccaggcgcggtggcttaggcctgtaatcccagcactttgggaggccaaggcaggtggatcatgaggtcagaagttcgagaccagcctggccaacatggcaaaatcccgtctctactaaaaatataaaaattagccaacgtggtggtgggtgcctgtagtcccagctacttaggaggctgaggcaggagaatcccttgaacccgggaggcagagggtgcagtgagctgagatcgagccactgtcctccagcctgggcaacagggcaagactctgcttcaaaaaaaaaaataatagaaaaggaaaaaagcagaagacaattcactgaaaatatttattattagagatttatgacgttattcctaatacattttccacgtgtttgaaaactgaactgagtgcaaggattgatgtttctacggctcttcacagtttatcaaaaacatctctgtacatctttggagcctcacgatctccctgggaggaagaagaaggggctgagttagtcccacggtgcccagaaggcacccaacgtatccaggtctgcccaggacttttccagagttagcctgaaagtcctgcatcctgggaagtccctcagccccagctcagctggtacgggcagtctctgagcagaaccaggctggcaccacatgcctgaggctgcgaccaggaactccccacctcgggggactcggggggaccctgccaccatcactgacaggacaagctccagggccaaagctgttcctgcaaacaccgtggtttatatgaaatccttgcctccctctggagcctggaatcctggcatgggtcaggcagcaggggcagcagaaccagcccccataggaacgtgggtgctgggtctctgggagcctcgctggtgacagtgctttgggctgttgtcccagctcgctgctggggatgtggcgtgtcccgcgtgacacatggggagagggcctggaagctgggcctagaagccgggcctggcctccccgacccaccccacgagcctttcccttcccaaactctgctctgtgctccatgtcctcttgctgggacaaaccacagtcacaaggaggcctcatgcggagtccagggtcctcccagcgagtcgccccatctctacaaaatgaccccatcttgacaaaaaaaatttaaaaattaggagggtgtagtggtgcccgcctgtgaccccagctactcgagaggctgagatgggaggatcgcttgatcctgggagatcaaggttgctgtgagctaggattgcaccactgcactccagcctaggcaacagagtgcaatcctgtctgagaaaaaataaaaataaatgccacatggggccaggcacggtggctcacacctgtaatcccatcactttggggggccgaggtgggaggatcacctgaggtcacgagttcgagaccagccgggtcaacatgttgaaatcctgtctctactaaaaatacaaaaattagccaggtgtggtggtgggcgcccgtaatcccagctacttgggaggctgaggcaggagaatcgtttgaacccgggaggcggaggttgcagtgagctgagatcatgccactgcactctagcctgggtgacagaacgagaccctgtctcaaaaaaaaaaaaaaaaaaaaaagccacttgggatccaggataggatcctaaaacagaaaaaggacattagaagaaaaaaaccgtgaaactgggataaagagtgaaatttagcttatagaaatgtacccacatgggcttcttggtggtcacaagtatatggtccagcctgggcaacatagcaagaccccatctgccatctctataaaaacaatgtaaaaattagctgggcatggtggtgcaaacctgtagtcccagctacttgggaggccgaggcaggaggatcacttgagcccaggaggtcgaggctgcagtgatctgcgattgtgccactgcactccagcctgggcaacagagcacggcactgtctcaaaaacagaccaaccccaaatgcatggtgacttcataagatgctaacataagggaaaactggtgagaggtagacaggaaatctctggatttctttgcaactcttctgaaaatctaaaattaaaagttcatttaaaaaaaatgcagactttttaaaatgctagtttccgttctacgagctcagggtaatttaccatcaataaaaggtagggatagggagctgaaatcctcactgtcacctgcaggtggtgcccttgccacaggaatgccctggcacccttgggctctggcagcagctggaatcttgcaggatctgctacaccagggcctgccactcaggacagcagcagctcagggcagcagggatgagtgatgaaagggctggagcggcatgcccacggggctgcaggaggcccagactcctgccctccaccttgcagggcagctatgaacataatccttcaactctgaatcatgtgtttttttttttgttttttgttttttgttttttttgagacagggcctcactctattgcccaggctggagtgcaatggtgtaatcacagctcactgcagcctccacctcctgggctcaagcgatcctccttcctcagcctcctgaggagctgggcctacaggtgggcatcactgttgtagtttttatgttctgggaagggggaaggaatgtgcttaatttgtgggctaatttttaattttttaaaaatagagacagggtctttgctatgttatccagcctggtcttgaactcctgggctcaagtgatcctctcaccaccttgtcctctgaaagggctgggattacaggtgtagccatttcacctggacaaccttaaattactgaatgaatttgaagtggtctggtgcgcccttcaactcactaccctgccagcgacaccgtacacaactagggcacatcttatcaaaaccagcaaactgagagaggcggatacattcagtgtagacgctcacccctaggaattattattattattattactttttgagacggagtcttgctctgtcacccaggctggagtgcgatctcagctcactgcaagctccacctcccaggttcaagcaattctcctgcctcagcctcctgagtagctgggattacaggcacctaccaccacccccggctaatttttgtatttttagtagagacggggtttcaccatgttggtcaggctggtcttgagcccctgacctcatgatccacccgcctcagcctcccaaagtgctgggattacaggcgtgagccaccgcgcccagccaggaatcattatttttaaacagccttattgtgaactaacgcctgtaccatacaactcgcccacttgaagtgtataattcattgttttcagtatatttgcaaaactggccaaccatcacctttatgtagttccagaacattctcatcaccctacaaagaagccccctcgccatcagcccccgatccccagccccggcccccacgcacaccctccctgactctgcggatgggtctgtcctggacatttcatagaaatggggtcacacactgtgtggccttttgtgtctggtgtctctcactgagtgtgacgtcctcaaggtgcatccatgctgtgacctgtgtcaaagactcgctcctttccatggctgagtcttactcctcctgagtatggaaggacgtgttttttaaatccattcaccggcggatggacaatcggctcgttccttcttgttggcaattgtgaatctgctgctgtgaatattcgtgtcataggaatcttttttttttttttttttgagacagagtctcgttctatcccccaggctggagtgcagtggggcacgatctcggctcacggcaacctccacctcccgagttcaagcgattctcctgcctcagcctccagagtaactgggatttcaggtacccaccaccatgcctggctagctttttttgtatttttagtagagacggggtttcctcatgttggccaggctggtcttgaactcctgacctcaggtgatccgccagccttggcctcccgaagttgttgggattacaggcaacaatgattcccagccctaggaatcatttttaagatgagttctcactctctgccttcactgcaaacctccctgtccccagccctttaaccccagcccctggctgtcctcaagaccttggacttggcagtgaggcgatccctgcggatgccccttggtctgcactcggcctcagagcagcttgggtcagaggcgagcacagcgtgggtgaagccgcatcccagccgctctgtcctcgggccttgagccgcaccagctggcgccaggctgtcccccagcgaccttcagcggctcactcagcctgacagaaacgctgtgttttcatgttccctgtgtggacaaatcacaatcgacccgggcggccagcagtggagacaaggaggagagacctctccgcgggggttaggtcccctcagaaactgccgagctggggcaacacgaaccgctgggacctcctgttcataaattagtatggatttcaaggcgccaatagcccggctttaaacccagctcagggccctgggcacctatgggcagctggcccttccacccagcaggcaggcaagtctcagacacaggcaagaaacactccaggtagcaggtgccgaatgtcagcagggagagatcagtcccccttgggacacagaggccatggacagtggtggtggtcaggggacctcgtgtacgaagggctgccaccgcctcccggccctccccactgtgtcctggaggcacttctccagatctctgtccgacttccttccttccttccttcctttccttccttccttccttccttccttccctccctccctccatccctccctccctaccttccctccatccctccctccctccctccctaccttccctccatccctccctccctcccttccctccatccctccctccctcccttccctccatccctccctccctccttccctccttcctttcttcctccctccctcctgccttcctttcctccctctctttctctttttctttctctctcttactctctttctgtcttcctttgtctctctctttccttctttcttctttctctttcttttctctctccctttctctctctctctctctctcttttttttttaagacagtctcactctgtcacccaggctggagtgcagtggtgccatctcagctcattgcaacctccacctctcaggtttaagagattctcctgcctcaacctcccaagtagctgggattacaggtgcccatcaccacgcccagctaatttttgtagtttttgtagagatggtgttatgccatattggccaggctggtcttgaattcctgggctcaggcaatccacctgcttcggcctcccaaagtgctgggatgacacgcatgagccaccgtgcctgaccaatttctttctttaaaaaattaaaataggccgggtgcagtggctcatgcctgttatcccagcactttgggaggccaaggcaggcagatcacctgaggtcaggagttcaagaccagcctgggcaacacagtgaaaccccgtctgtactaaaaatacaaaaattagccaggtctggtggcaggcgcctgtaatgccagctactcgggaggctgagatgggagaatcgcttgaacccgggagacagtggttgcagtgagccaagatcgcactactgcactctagcctggacggctaagcgagactccgtctcaaaaaaaaaaaattaaaatattcgcatgccataaaattcccccttgtagaacctggagaatacgatgccaagtgaaataggccagacgctgagagagaaaaacactgcgtaatcccacgtattgtggagtccaaaaacaaaacaagcaaagaaccccaaatacagccaggcacggtggctcatgcctgtaatcccagcgctttgggaggccgaggcgggtaaatcacctgaggttgggagttcaagaccagcctggctaacatggtgaaagcccgtctctactaaaaatataaaattagccgggcgtggtggtgcatgcctgtaatcccagctactcaggaggctgaggcaggagaatcgcttgaacccgagaggcagaggttgcagtgagctgggatcgtgccacctgcactccagcctggggaacagagcgagactccatctcaaaacaaacacacaatcaaaacctcccaaatacatagaaacagaaagcagaagagcggttagtggtagaggagggaaaggaagggggagatgggggtcagaggatacatagtttcagctgtgttggaaacactgagagatgtcactgtagcctgtgaaccagctaaagatattgtactatgggctgggcacaagggctcatgcctgtaatcctagtgctttgggaggttgaggtgggaggattgctgaaggccagaagtttgcaaccagcctgggcaacatagcaagaccctaggccagaagtttgcaaccagcctgggcaacatagcaagaccctatctctacaaaaaatttaaaaatttgctgggcatggtggctccagggatcacgtgagcccagaaggcagaggctgcagtgaaccgagatcacaccactgcactccagcccgggcaacagagcaagactctgactcaaataaataaatcaaaataaaataaaataaataatagaaactgaaaacaaaaaccaggcctcacccacagtgtcgaaggcatgcatcttctagggttattaaggtgctggttgttatttttgcttgtaattctgaaaaggctgatagattttatagcccagtatctccaagcagcgcccaaggacacaaacagccagaccctcagctcccaaacctggggatttgcaacagacaaacacagagctgggaaattccgcagcagggcagatgagggatcgatctgagtcccatgatcctcggccctgctgaggtcccaggaggctgcacacattgaaatccacatcctgagtggggcggagggaggaggagaatcccaggagctggggggcccccctggtttataccgtcttccccatcaggagtttatcctggtgtctggagtgagaagggatcgaagtctatttttttccagatgaatgtagggtctccccctcggcactgtgggcattggggccggatcattctctggggtggggctgtcctgggcactgcggggagctgagcagcgtccctggcctccacccaccccatgccaggggcatcccccatctagagctgttccgttgccttgaatttctgccctctggcctcccctgtcctcatccttatgggatcttcagatggtgcccttgaggcccagggcccgtgtcccctcctcactcagccctcctatccacaggtgactcacagtccccttggcaccacccaggcgctgtccctggcctcgcccatggctaaccttggcaggcatccccaacagaggcgaggggacagctctcgcctgcctcggcgagcccgggttccagaagatgtgcccagcaccctgggccccccaccgccgggtctgggacacagatgctctcctccaaacctcccattcagaccctcgctgtggcgggggcggggccgtgtcttttgagactctgcatatgcacgagggggtgagtttgagtgaggcggtctccatgcagaggaaggtctttatttaggaagccaggtgggggcggggccggctggggaggagaggcggagaggaaagacgagcttctgcagatttcaaacctgtcatttcttttctgacgcataccctcccctcccgcttcatgacaagctctgttcccaccttccccgggttcccagagcagcctcctagacacgatccgaaacagcacgggtccccctcccaacccccaggcactatggacattagagctgggtcactctctggggtggggccatcctgggcactgcagggagctgaacagcatccctggcctccacccactctatgccaggagcacccccagtcacgacagtcacagatgtccccagacattgcctgatgtcccctggggaacagaatcatccccagaaagacctcctcagttagggggttccacagatccccaagagactgtgtcccatgatcctcccccttgctgaggtcccaggaggctgcacacattgaaatccacaccctgagtggggggagggagagaggaggagaatcccgggaactggagtcccctagtttatgttgtctgccccattgggagcttattctggtgtctgttgtgagcagagacgcaattcaattatttttttcgaaataatgaatgcagggtctcccccctctgcactgtggacattggggctggaccattctctgggctggggccatcctgggcactgcagggtgctaagcagcatccctggcctccacccactccatgccaggggcacccccgagttgtgacaaccacagatgtccccagacattgtccagtgtcccctgggaggcagaggcaggaggactgattgagctcaagagttcaagaccagcctggaccacatagcaagaccccatctctacaaaaaaaattttaaaacatagccaggtgtggtggtctgcacctgtgatcccagttactcaggaggctgagatgggaggattgctgagtctgggaggtcgaggctacagtgagctgagatcacaccactgcactccaggctgggtgacagagcaagactctgtctcaaaaaaaaaaaaaaaaaccacacacacacaaaaacaaaaagagaccctatctcaaaaaaaagagggggttaaataatctgactagatacctctcaaataaagacacgcaggcagccaacaggattatgaaaaaacgctgaagatcattaatcagccaggaaatgcaaattaaaaccaaaatgagatacctgttagaatggctatgatccaaaagataaaagataaaaaacattagtaaagatggccgggtgcggtggctcatatctgtcatcccagcactttgggaggatgaggcaggcagatcacgagttcgagaccagcctggccaacatggtgaaactctgtctctactaaaaatataaaaattaggccgggtgcggtggctcatgcctgtaatcttagcactttgggaggctgaggtgggcggctcacaaggtcaggagatggagaccatcctggctaacacagtgaaactttgtctctactaaaaatacaaaaaaattagccgggcgtggtggcgggcgcctgtagtcccagctactcgggagcctgaggcaagagaatggcgtgaacccgggaggtggagcttgcagtgagtcgagatcgcgccactgcactccagcctgggtgacggagagaggctccgtctgaaaaaaaaaaaaaaaaaaaaaatacatatatatataaattagccaggcgtggtggtgggcacctgtaatctcagctgcttggagactgaggcaggagaatcacttgaacctgggaggcagaggttgcagtgagccaggatcgtgccactgcactccagcccgggtgacagagtgagactccgattcaaaacaaaaaaaaaaaaaagaaagaaagaaaaaaaaaagaaacattggtaaggatgtggagaaaagggaaccctgtgtgctgttggtgggaatgtaaatgagcacagccattctggagaacggaatggaagttcctcaaaaaattaaagatagaaccaccatatgatccagtaatcccacttctgggtatacatccaaaggaaatgaaatcagaatctgtcagcctcattcacaatagccgagataggaaaccaacctacatgtccatcgttggatgaatggatacagaaaatgtgaggccgggtgcggtggctcacgcctgtcatcccagcactttgggaggccaaggcaggcggatcacaaggttaggagttcaagaccagcctggccaacatggcgaaaccctgtctctactaaaaatacaaaaattagccgggcatggtggtgcacgcctgtagtcccagctactcaggaggctgaggcaggagaagcttgaacccaggaggcgggggttgcagtgcgccaagatcacgccactgcactccagcctgagtgacagagtgaggctccatcaaaaaaagagaaagaaagatgaactagaccagaggttggtaaactctggcccatgggtcaaatgcagcccactgcttgcttttgtacataaagttttattggcacacagccgtgcgtgttcacttacatatcatccatggctgcttctgggctcctacagcacagctgggaggcctcgacagagagcacatggcctgcaacgccaagaatttacctccggccctttaggaagggttgatataatccgtgtactagagttagatctcagaggaccttgaatgccagaaacgagtaagtcctaatgatttttagcaaagagtaacactgtaaaaccaaatgtttacagatttcatgtgctggaatcctctgggggtggggcagcggagaggccttaaaacatgaaacagcgtcagatcaattttcaatgattgtcttcaaaattaaaactggctcattacaggcgcggtggctcatgcctgtaatcccagccctttgggaggtctaggaggacagatttcttgagcccaagagttcgagaccagcctgggcaacatggtgaaacccggtctctactaaaaatacaaaaattagttgggtctggtggtgcacacctgtagttccagctactggggaggctgaagcaggaggatgtcttgagcctaggagttcgaagctgcagtgagctgaaatggtgccactgcacttcaccctgggtgacaaagcaagaccccgtctcaattaaaaaaaaaaaaaaaaaaaaaaaaatatatatatatatatatatatatatatatatatatatacacataataacatttatcctaaaaagagaaacagtacaaaggcactcagagctgaaactcaaagtcgtctgccagtctctaactcctgacttttgggtttcatgtcctgctttataggactttttgaattctgcccccaaggatccttttcaaaaatcttttgtttcagccaggcacaggggcttgtgcctgtaatcccagctactggagaggctgaggcaggaggatcatttggagccaggagagctggagaccagcctgggcaacatagcaagacaccatcttttaaaaaaattttgtttctgttttggaaaaattttcgatttacagaaaagttgcaaatctagtccaacgttccctatgggcagcaggcaacctaggtaccgaggcaagagactgagggcacgagctgcctggctctgccttcgagatagcagtaacagaattagtgaaagtactaaaagtctctgaaatgcggaaataatggcgtaagctgtctcctctctctctctctctctttgcctcggctgccaaacagggaagggccccatgtccagtggacacatgaccttacctatcattggagatggctcatactccttaccctgcccccttgtcttgtatccaataaataacagtgcagcctggcatttggggccactaccggtcttcatgtcttggtggtagtggtcccccgggcccagctgtcttttcttttacctctttgtcttgtgtctttatttctacgatctctcgtctccacacacggggagaaaaacccacagaccctatagggctggaccctacagttctcaaacgcccctcacccagtttcccctcatgttagtatcttacatctggggtctgcaaattttttctgcaaagggacaaaaagtaagtattttatgctctgtgagctaaagggtcactgttgcatattcctctttgttatttgtttttttacaacacttttaaaatggaaaaggctttttagccccgagctttataaaaataagccaagtataaacaaaacgtggtacatcccccgaaaccaaaatgtacccccgtgttcacagcagcacgattcaccacaccccaaaggcagagacacccaagtgaccaccgagagatgaatggataaacacaatgtcatccattatgccacggaatatgattcagcctgaaaaaggaaggaaattttgacatgggctagagagtggatgaactttgagggcatcacgcccagtgaaatgagccagatgcaaaaggacaaatcctgtgtaactccacgcttaggaggtccctagagagtgagccacaccaaatgtaaactgtagctgttagtcaataatcatgtatccactggctcattagttgtaacaaatgtagcacattaatgagagagggtaacattgggggaaatgcgtaccttttcggggagaggagataggtgggaactctgccttctgctcaattcttctttaggcctaaaactgctctaaaaatagtctattaaaagggggacttgaagagacaaattgtgagagttgtatcacgaaccaagcgttctgatttttttttttttttgaaatggagtctcgctctgtcacccaggctggagggcagtggcacaatctcggctcactgcaagctccacctcccgggttcatgccattctcctgcctcagcctcccgagtagctgggactacaggcgcccgccaccacacctggctaattttttgtatttttagtagagacgaggtttcaccgggttagccaggatggtctcaatctcctgacctcgtgatccgcccaccttggcctcccaaagtcctgggatgacagacgtgagccactgcgcctggccttgattttttttaaataaaggagaggagggccgggcgcggtggctcacgtctgtcatcccagcactttgagaggctgagatggggggatcacctgaggtcaggagtttgacaggagtttgagaccagcctggccaacatggcaaaactccatctctactaaaaatacaaaaattagccaggcatggtggcacttgcctgtaatcccagctacttgggaagctgaggcaggagaatcgcttggacctgggaggcggaggttgcagtgagctgagatcacgccactacactccagcctgggaaatagaggagtgagactccatcttaaaaaaaaaaaaaaaaaaagagaggaggggagggaaagagggagggaaggaaagaggaagggagaggaagagggagaaagggtgggagagagaggaaaacagagtgagagggagggagagaggaagggaaggggaatgagtgtgagcgagggagggatggaggaaggaaggaagggagggagggagggagggatgagggaaggaagaggaaaggagagacacccactttagacaacatgatccgtaagcactgacatttatgactggatccccttccacaagcttcctgaataagccccagagagaagactggtcagtcttggccaaatggattttctgctttcccccgagcccctgtgagtatcatcacaatgtaataccatgaggatcaaaatctcctggccacttaagcctggattaacccacaccagagccatcctcctcaccgaggggccatggcggcgagcggatcacacagcagtcctcatggaatccgtcccaattagcctctgtcggattactcacagaacctgccatccgtggaaggcagattagcctaggatgcatgtgtaaatcccatttggtgaacgaaagcatattctggagatgattagcttatttctgcaagatggcatcaagtgggagataacacatcttcatccccgttacacccacaaggctctgtgtaattctccctgagcctcatccctttccaatcctgattccctgtgggagaaacacaattccttccattgaagggttgatgctgtgggtaagaccttttcatcctcctgctccaaaaccacagggaagggagaaactggacgtatatttttcatctgtttaccatgttcctgccctcaaaggtacaagaagacaagctagaaagtagacgaggctgggtgtggtggctcacgcctgtgatcccagcacgttgggaggctgagatgggaggatgggggcctaggagttcaagaccagcctgggcaacatagtgagacacccccaccaccaacaccccaccaccatctgtacaaaaaatacaaaaattagccagtcgtgatggtgtgcccctgtaatcacagctacttggaagcctgaggcaggaggatcactggagcccaggagttcaagactgtggggagccatgctcataccactgcactccagcctgggcaatggaggaagaccctgtctcaaataaataaataaagacacagtgacttttgcttgttctttcttgggtcatgtgttctgggggaagccagctgccatgttgtggggaaatgcaggcagtgctgtgaagaaatccatgtgttgcagaaatgggccctccaggccgggcacgttggctcacacctgtaatcccagtactctgggaggccgaggcgggcagatcacctgaggttgggagttcgaggtcagcctgaccaacatggagaaaccctgtctctactaaaaatacaaaattagccgggcgtggtggtgcatgcctgtaatcccagctactagagaggctgagacaggagaattacttgaacctgggaggcggaggttgcagtgagccaagatcgtgccactgcactccagcctgggcaacaagagcaaaactctgtctcaaaaaaaaaaaaaagaaaaggaaagaaagaaagaaaagaaagaaagaaagaaagaaagaaaagaaagaaagaaagaaagaaagaaagaaagagaaagaaagaaagaaagaaagaaagaaagaaagaaagaaagaaagaaagaaagaaagaaatgggccctccaggctgggcacagtggctcatgcctataatcccagcactctgggaggccaaggttggggcaggtcatttgagatcaggaatttgagaccagcctggccaacacagtgaaaccctatctctactaaaaaaaaatataaaaattagccagtaattggctaattactgtaattatgcctgtaatctcagctactcgggaggctgaggcagaagaattgcatgaatccaagaggcagaggttgcagtgagccaagattgtgccactgcactctagcctggctgacaaagtgagactccattaaaaaaaaaaaaaaaaaaaaaggaaggaaggaaggaaaaaaggaaagaaggaaggaacgactcatttgggcattttgccctcctgtcaaggccagttggaagctgaggcctccaccaacagccacatgagggcgccctcttgaaagcagctcctccagctccaatcgagccttcagatgatacagccccagcacattcactgccagaatcacccagtggagctgcttcctaactcctgagtgagggtggaaaaaactcaaactcaaattgcttttcctcttgctctcacatcaacagcaatcaacatggccaggtgcagtggctcacgcctgtaatcccagcactttcagaggccaaggcaggtggatcacttaagatcaggagtttgagaccagcgtgaccaacacggtgaaaccctgtctctaccaaaaatacaaaaattagccaggcgtggttgtgggcacctgtaatctcagctactcaggaggctgaggcaggagaatcacttgaacctggggggcggaggctgcagtgagcagagattgcaccattgcactccagtctgggcgacagagcgagactccatctcaaaaaaaaaaaaaaaaaaaaatcaacccaagatatttctgtgaccaaatgtgagaggagtttccccacacaccagctagctgtcccctaattcgattcagttcaattcaattcaggtgctatctacctggagacagccttggaccccacaggttgagggctaaatccccccacaagactgcccctaacctcttcagataccagtagcaagtttgggcctccagaacttccaactgaccagcttgaagttagggttgggtttaatttactacagcagctctcggaattcagggaaacacatttactggtttaatataaagcatattacaaagaatacagacgaaaagatgcataggatgaggtatagggaagaagggcaaagcttccttggcatgctacccttcaggaacctccatgtgctcagctatctcaaagttctccaaaccccgtccttttgaagttttatggaggctttacttcataggcatgactgatcgcgtcactggccactggtcatcacctcaaccttcagcccttctcccctccccagaggctggagggtacagctaaaggttccagccctctcatcctgccttgatctttctggtggccagaccattcctgaaaataactagaagctgtcagccatcagtcgacttatcatcatacaaaaagacatgactttgcagattccaaggattttaggagttctgcaccagaaaaaaatcaggacaaagaccaaataatataataaatataatgcaagtaatataatatcccactgacccacagaaactgcaggatagtaaatgcttgctgtttaagctaagtgttggggtaatttgttacacagtgatagataactggtacatctgcaaagggaaggaagggctgatccacatgactcctccaagcagatgttgctatagtttgaatgtgtctcccaaaaagcatattgtagaaactttaattcccaatgccaccatgttgagaggtgagaactttaagaggtgattaggttatgaaggccctaccctcattaatgccatctctctttctctctccctctcaccctttctctctctctcccccccctcctctttcttccccagttccccaatctttcatatatgtgctcttttgcccttccacctctgacgcagcaagaaggccctcaccagatgccagcacctcgacattggacttcccagtccctagaaccgttaagaaacaaatctctattatttataaattatccagtctatggcattccattatagcagcacaaaataaagacaggtgtgtagtcaaacattaccttttcctaaaagccagcaattggatttttcattttcttgtttttccaatatctatcaacctgataattgggagagatgcaaaagcccagatggataaggtacattcactgagggcaaatcagaagaatgaccaggccaagaaaatgattcattttggcattttgcaaattatcaagatatgcatgccagcaccagtttttaaaactgaacaaatccactggcttttatctatttcctactaaagcaacgtggcttgatcttgacactattaaactggggcttgattattctctggggtggggccgttctgggcactgcacagtgctgagtagcatccctggtctccacctactccaggccaggagcacccccaagtcacggtacccacaaatgtccccagacattaccagtgtcccccagggggcaggcttgcccccagttgagacccaatgctctaaggcatgtccctcaagggcaggacagccagggacctgacatttgatgacaggcctatcctccaccgccccccaggcccggctgcacttcctcctctgggaactgagtgggcaggacgggctgtcagagcccccttcccttcccacgctgacattctgccagcacgtggcaggggcgtcttgtctcgttggaggctggatatagaaacacagccctgtcctttgtgccatcgctgaagttgtcaacctcagccttcactcatcaccacagcaaccatctaaatatgtcaccagcaaagtgctgattgcaaaggaagggggcagagaggcctggacgggctctcacccaggtgcaggcgcaggggaggtgccgggactgggggagtgacgtggctgcttcagagccacgagactgatgacggccaggccgggcgtgacctggaacaggctccactgcaccctggggcacacagaacaaaggggcaggcctgcttgaccctgagggttcaaggtctctgtgagccgaggtcaaggagggggaaggaacaatcagacggttggctctgtgtcctgcaccctcagtgctctagagaccctcctcacccagtcctctaggtcactctgggaggatggccccggctgacaccgtctgccccatcgggaatctattctggtgtctactgtgagcagggagcaaactcatttttttgccagttaatgcaaggtctctcccctggaaaccgtggacattcagagctgggtcattctctagggtgcagctgtcccggacactgcagggtgctgagcagtgtccctggcctccacccactccacgccacgaccatcctcaagttgtgacaacgacaaatgtcctcagacaacacccagtgtcccctggggcagaatcaccctcagttgacaccccctgaattaggaaattccacggacccccaagatactctgtcccctgatcttctgtcctgctgaggtcccaggaggctgcacacattgaaatccacacctttagttggggggagggagagaggaggtgaatcccacgagctggggtcccctggtttacaccgtctgccccatcaggagtgtgtcctggtgagcaggaagcagactccatttcttctccaaataatgaatgctgagtctctcctcccaggcacggtggacactggggctgtaccattctctgggatggagccgtcctgagcactgcagcacgctgagcggcatccgtgacctccagccactgcatgcccggagcacttctcaatggtgacagccacaaatgtccccagacatggcccagtgtcccctgggggggggggggcaggatcaccctgccgtgctggacagtcctcgccacaccccacctcttggaactggaatgtctggtgagacgggcaacaaggatttgggaagagggccatgcgggacaaaaaaaagaaagaaaatgagaacgaacggatttctatttcccctcaatgtgaaaatagctccactgagtcccgaggaaggattgggtggggacgtacgctctggtatggccaaggtggagtgctggacaagagctactccattctgacttcacgactcgctgtctggctgggtgaccttcagtcccttgccactgtcgctgtgcctcagtttcccactctgtagaatgcacatcgaagcagcatccaccctgtgagactggttttggagattacataaatgagtatctataaaatgtttaaagtggtgtctgagccatgggtcatggcacatactggctttattatttagaacctggattacctccttttattattctttttcaatttattttacttattttttgagatggagtcttgctctgtcatccaggctagagtgcagtggtgcgaacttggctcactgcctctgcctcccgggttcaagtgattctcctgcctcagtcccccatatagccagtattagaggcgcccgccaccacgcccagctaatttttgtatttttagtagagacagggtttcaccatgttggtcaggctggtctcgaactcctgacctcaggtgatctgcctgcttcagcctcccaaagtgccaccgtgcccggcttatgttttaatttttattgtatttatttattcatttttattttgagacagagtcttgctcttgtcgcccaggctggagtgcagtggcacgatctcagctcactgcaaactcagcctcccgggttcaagggattctcctgcctcagcctcccgagtagctgggattacaggcacctgccaacatgcccggctaatttctgtatttttagtagagatggggtttcgccatgtcggccaggctggtcttaaactcttgacctcaggtgatctgcccacctcagcctcccaacgtcctgggattacataggtgtgagccaccatgcctgcttttttagtttttacttttcatagagataggatcttgctatgttgcccagactggccttgaactcctgggctcaagcgatcctccctgctcagcctccccaagtgctgggattacaagtgtgagccaccttgcctggccagattacctcctttctggactagaccagagcacagcaaagtgtttctgtctagggcaggatgtaaaaattttcagccttacggaacatatgttctctgttgcagctacacagttctgctgttgtattttgaaagcagccatagactatgcataaataaatgggcatggcccatcgtgtgccaataaaactttatttatagtaacaggtggcctggatttgcccccaaggccattggttgagaccctcgcaaaacagtctaagacaaaatagcaccatttcagcaactaaatactctcatctaggcagtgttccagtcttccatcctgaaattagatgagggtcctgtcaaaaaagattcacctccgatcctcaacatcacacggcagagttagcacagagcatcccttcacacaaaacacacactcatccgggcgcggtggctcacgcctgtaatcccagcactttgggaggctgaggcgggtggatcacttgaggtcaggagttcgagaccagcctggctaacatggtgaaacccaacccgtctctattaaaaatacaaaaatcagccgggcaaggtgctgcgcctgtaatcccggatacttgggaggctgaggcggcagaatcgcttgaacccgggaggcggaggttgcagtgagcagagatcacgccactgcaacccagcctgggccacagagtgagactccctctcaaaaaacaaacaaacaaacaacaaaaattttcacagccccaaggttttgtttctttgaaatgcagaaaacggctgtttcttttcttaccatctatcttctgtgcgtgaatacctcacctctatgtgctcgccagaaaacctcggctgcaaagggcattcggaatatctcatttggggccaggtgcagtgactgacacctgtcatcccagcactttgggaggccgaggcaggaggatcacttcaggccaggagttcaagaccagctggacaacacagtgagaccccatctctacaaaaataatttaaaagtaggccgagcgcaatggctcatgcctgtaatcccagcactttgggaggcggaggcaggcagatcagctgaggtcaggagttcaagaccagcctggccaacatggtgaaaccccgtctctactaaaaatacaaaaataggccgggcatggtggtgggtgcctgtagtcccagctactggggaggctgaggcaagagaatgatatgaatccaggaggcagagattacagtgagccgagattgcaccactgtactccagcctgggagacagagcaactctgtctcccaaaaaaagaaaaagcaaacaacaacaacaaaaaagaaaatctgaaaaactgtcacaggccagagatgggatcctggatggggccctggggcaggagaggacattagaggaaactgaggaaatctgaacagagtgcagacttgggttaatgaagatgtatcaatactggtttattcgctgtgacaaacgcaccatgccattggatgtgaatactaaggaaaattgggtggtgaggagatgaaactgtctgcactgcattcccagtttttctgtaaatctgaaactattctaaaatgaaaagtttatcaaaaaaaaaaaagagacagagagaagagaaggacgacaggcaattagctacttacgctagaaaatgctgtaaaatgtgattgagggaacattaagttcatgtgccagcatctaataatgagatgattatgtaaaacctagaaaagaaagacgctaaaaacgggatatgcaaattggcaggggaaatttgcgcttatgaaaagaatgggaggggtgggggaaccagtggctgggcggttggtcttgtctcctgtttccctggctcggtgacggccaccaaggaccccaaccccagggagatggaggggctgctggagggagcccccggaacacccgaggccaatttcggcagcatggtgtattccctaccaaggctgtcggcatccaggcagcgctcaatgaatgcctgctaagggtgcagccgctcctgggctggaggagggctgcagttttatggatggaaagttctagaaaataagggtgatgctgtggtctgaaggaagaagcaagacaactgataatatgccgtgacatcctgatctttgcacagcgggttagatattgtcacccacacctggtgctgacatttggggccaatggctgtggtagggggctgtgctgagtaccgcagggtgctgaggagcatccctggcctccatcctctctatgctgggaacacccctcaaccgcaaatgtccccagacattgccaaatgtcccctgggaagtaggatcattcctgctgagaaaccacggtcccacaatatccagcttaatccacctgacaaccccataagggatacatataatcctccttccacagatggggaaacacactgaaacgaggtaaagtcagctcaaggtcaccaccctaggagtaagtctcaaagaagggggtggtcgtgtgtgttgactgccactttagtaacagagacccctatgctgggcaatgctggtctaacatggcaagaatcagaaaactaccgctgtgggttgggcgcggtggctcacacctgccatcccagcactttgggaggctaaggcgggcagatcacgaggtcgggagttcgagaccagcctgaccaacatggtgaaaccccatctctactaaaaatacaaaaattagctgggcgtggtggtgcatgcctgtaatcccagctacttgggagactgaggcaagagaatcgcttgaacccaggaggcagaggttgcagtgagccgggatcgtgccactgcactccagcctaggtgatagagtgagactctgtctcaaaacaaacaaacaaaaacaaacacaaacaaacaaaaaaactaccactgtgggtcaaatccagcccaccacttgctttcgtcaataagttttgttgaaatacagccatgcccgtttatgtactatctagggcactttccaacatcaacagcagagttgagtgcctgcaacggagagcgcctggctcagagcgtcgaaaatatttactctctggctctttacagaagaggtctgttgatggctgggtgcagcggctcatgcctgttatcccagcactttgggaggctgaggcgggaggatcacttgaggccaggagtttaagaccagcctggccaacacggtgaaaccccgtctctactaaaaatacaaaaattagccaggcgtggtggcgggtacctataatcccagctactcgggaggctgaggcatgagaatcacttgaactcgggaggtagaggttgcagtgagctgagatcgcgccaatgcactccagactgggtgacagagcgagactctgtctcaaaaaaaaaaaaaaaagaaagaaaaagaaaaggtgtgtggacacctcacaagacagagccccagagccctacatcattacttcaaggcctctgactgttttcttttgaaactctctgtctctctctctctctgagtgctccgttaatattttgttggaggaacaaaaacagcagggtcagcctcctcagggggtgaaataagctctgtctggtgcagcctggttctggccacggagacccaccctcccctcagcctggctccagaggaaggagcaccagtggggatagacccaccccactgtcgggggagcagagactggcagcaggcctgcctctgaggcccccgcgggagccgtgctgtcacctcgaccccgctgtcacgggggacagagctgaggcctgcgctcccagcgccggtgtctgcaggcacacaggtcaccctgactccacaaagtcagccctgcagcctccagacggtcagacttgctgagctaggacggccactgcgtcccatgtggcttgttttcccagaccctgagctgcctcgggcatggctgtgtgacgggtgtggagattcacagagcaccctattctctgagggtcactttggtccagggtctcctcccctaggcactgctgaggcactggggctggagtgttctctcgggcggggctgtgctgggcactgcagggtactgagcagcatccctggcctgcacccactccatgccaggagccctcgccccgccccccacaagttgtgacaaccacaatgtcccagactttaccaggtgtcccctgggggacagaatcatccaccattgacaccccctgggttacagattccaaggaccacccctcccacaaagagacggcgtcccatgatcctctgccctgctgaggtcccaggaggctgcacatattgatatccccaccctgagtggggagggagagagggggtgaatcccaggagctgggggtccccctgattttgggagtttattctggtgtctggtgtgagcagggagcagactcgatatttttccaaataattaaagcagggtctctcccccttggaattcaaggatggatcgttctctgtggtcaccctgggcacggcagggtgctgagcagcatccttggcctccacccagtccatgccaggagctgcccctctcttaactgtgacgaccacaaatcagtacccaactatgtttaaaactctccagctgatctcagacaacccaccttccaccaactcccagcagctcaggagcctttctgatgaccaccctggcagttgcaggaaggccgaggaccaccccggatccccctggacaccggtggctctgagcctcgacctggccagcaccagccaaaaggaccaaccctccaagtgctgacgaacgaggtgaatgaggctcaaggtgacgttgtccggcctgccttctgcctcacacgcttcccccagcttcagccgcctccccgagacccgagagctggggaggagccaggcaggggaacgttcgtcctggctgagctccgaggccatgtccaggggtcatgaatttgaggtcagccctgaggcgggaaggtgacgggtagcatgcggagccccagagagacaacacctggcccattcaaagggcatcaggcaccgctcctgccccagtgggtgtgaagcccaatgtcatcagctcctccaactactctgagaagctgggagatgttctattgtaaaatctcctgatttttagtttcattttattttattttatttttttttaagatggagtctctgggaggccgaggcgggtggatcacgaggtcagcagatcgagaccatcctggctaacacagtgaaacctcgtctctactaaaaatacaaaaaattagccgggcgtggcagtgggcacctgtagtcccagctactcgggaggctgaggcaggagaatggcatgaacccgggaggtggagcttgcagtgagccgagattgcgtcactgccctccagcctgggtgacagagtgagactccgtctcaaaaaaaaaaaaaaaaaaagatggagtctcgctctctcacccagtggcgcagtctcagctcactgcaactgctgcctgccaggttcaagcaattctcctgcctcagcctcccgagtagctgggaccacaggcacctgccaccatacccagctaattgtattttcagtagagacagggttttgccatgtgggccaggctaacctcaagtcatcctcctgcctcagcctcccaaagcactgggattgcaggcgtgagccactgcacctggcctatttttaaatattttgtagagatggggtctcactgtgttgcccagggtggtctagaactcccagcctcaagcaatcctcctgcttcagcctcccaaagtgttggaattacaggtgtgacgcccgatttttttttttttcttttgagacagagtctcactctgtcatccaggctggagtgcagtggtgcgatctcagctcgctgcaaaccctgcctcccatgttgaagcaattctcctgcctcagcctcctgagtagctgggattacaagtgtgtgtcaccacaccggctaatttttgtatttttagtagagatagggtttcaccatgttggccagcttggtctcaaactcctggcctcaagtgatttgcccgcctcgacctcccaaagtgctgggattacaggtgtgagccaccgcgcctggtctgtgacccctgatttttaaatgctggcaataattcaaagtttaaagccactgggttctaccttggccaggtgaccaatgtcaacaccaccagtgtggacgtcacgtgcccctgatgtgttctccccagagccctgaaccccagactattcaagagcaaacatcatggaaactcacgttgggggacattttacaaaactcctgacgagtcctcctcaaaaccactaggttggccgggtgcggtggttcatgcctgtaatcccagcactttgggaggccgaggcgggcagatcacaaggtcaggagatcgagaccatcctggctaacacggtgaaaccccgtctctactaaacaatacaaaaaattagctgggcgtggcagcgggcgcctgtagtcccagctactcaggagggtgagccaggagaatggccgtgaacccgggaggcggagcttgcagcgagctgagatagcaccactgcactccagcctgggtgacagagcgagattccatctcaaaaaaaaaacaaaacaaaacaaaacaaaacaaaaaaaaacccagcaggtcatcaaaaccaatgagtctgagaagtgtcccagcagagtgtaaggagatgtcgggagtcaatggcatgtgggttcctggaaaaaacaagaaaatggaaataaagaccgggcgccgtggctcacgcctgtaatcccagcactttgggaggccgaggcgggcggctcacctgaggtcaggaattcgagaccagcctggccaacatggtgaacccctgcctctattaaaaatacaaaaattagccgtgcagggtggcaggcacctgaaatcccagctacttgggaggctgaggcaggaggatcatttgaacccaggaggtggaggttgcagtgagccaagatcacaccactggcactccagcctgggtgaaagagcgagactccatctaaaaaaaaaaaaaaagaaagaaagaaagaaagaaaaataaaatgtaaataaagtgtggagttgagttcgtgataatgtatggatactggtctttttagaaaatttctttctttctttttttagagagagggccttgtactgcttttgtatattttaaacatacaattgtgtatatttccaatatatttcagagttttcttaggatacatttgtgataatttgttacacagaattagctaactaatataggctgtttccaaaattcaaaactaccctaaaagaaatctgaggccagggaccgtggctcacgcctgtaatcccagcactttgggaggccaaggtgggcggatcacccaaggtcaggagtttgagaccagcctggccaacgtggtgaaaccccatctccactaaaaatataaaaactagccaggtgtagtggcaccttgcctataatcccagctactccagaggctgaggcaaaagaattgcctgaacctgggagccagaggttgcggtgagccgagatcaccccactgcactctagcctgagcaacagagtgagactccatctcaaaaacaaaacaaacaagaaaaaagaatctgaaatataatggaaatacacacaattgtatgtttgaaatatacaaaagcagtacaatccactcttgaagggaatcagaatcgtcacactgctgggaaaagggcaaggtctccaaaggtgactggtgtttttgttttttgtttttgttttgtttttttttgagacagagtcttgttccgttgcctaggctggagtgcagtggtgcaatctcagctcgctgcaacctccacctcctgggctcaagcgatcctcctgcctcaacctcccaagtagctgggattacaggcgcccacaaccatgcccggctaatttttgcatttttagtagagacgagtttttaccatgttggccaggctggtctcgaactcctgacctcaggtgatccacccgccttggcctcccacagtgctgggattacaggcgtgagctactgcgtctggcctgcaaggtgactgttttaaaacacagaggacacctgctgagatgcaaagtcagggagtgttgaagaaaacagagatctccttatgtgatggtcgtaactcgcatttccaccctcgacagcgccgactccatcgggcagcttttctacatagtcaagtttgaaaactgtgccattgtacgtcaccagaaacggactcggttagaaaacaatgctctttcgtaatgtataccgtactacttttcctaaaacggaactgtcataacgcctccccctctggctgagactagaatagataaaaatccagattttcacacactcgggactggtaatgttttaacacatggaaaacgcgacagggttacagactgctttagcttctccaaacaaatccgcaacggcgccaagcactcctaacagttggacgtgttcataaatgaacccaaacagatcacgttctcggagacggatgcacgccagaaattcctgtcgtgcccctgaagaactaacaggtctctctctgcaacggtggacgactggtcaaaccctggaaccagccaggaacagcagcaagtgcacgggctcgggaatgggaatctggctttatggaacctccaggctcaaggggacaccaggaagggacagcttcgtgaccaagcccggtgtgacccaccaaaaatctgcaaccacgaagaccaggaaatgccagcagtgccgagcaggagaggtcgcttgacggtaaagaagcagggagcgttatttagcaaaccaggctggttaaagagtagagaatatcagatgtcgcggcccctctgcagaggacagttctgaaggacagcgatgacctaaattggctcctatgagggactgctgggggaaatatttccccaggatcctataagatacaaagaaaaacatatgaaaacagaaaagatattcccgacacttgggggtctcaatggggcgggggaggtctgaggacatctgtggttttcacgattggggggagctcctggtatggagtgggtggaggccagggacactgctcagcaccctgcagtgcccaggatggcccctccccagagaatgatccagccccaatgtccacagcaccagggggaagagactcaaagttaattatttggaagaaaatattgttgagccagatgcctcagaatgggaccttatttggaaacagggtttctgcagatggacttattattaagatgtggttgtgctggattaagatgagccctaaatccaataactgatgtccttataagacgagggaaatttggacacagacccacacagggaagggggccgtgtgaggatggaggcagagactggagcgatgtcaccagcccaggggcgccaagaaccgccggccacttgccagatgctggaagaggcaggaaggatcctccccgggagcttctgggccgggaacggccctgcccacaccttcgtctcagacttctggcttctagaactgccagaaaatccatttctgtggttttgagccatgcaggttgaagtcattttccatgggcgccctcaaatatccaaacttcaccccacagagaccctcccctaggcacccacatcctggcatgttcagacaccctcctcgtgaacatgcacagcccccaaggcaccagatagacattgatttccatctagaagtgtccgtcaaaccctcagcgatatatctctgccgcccaggctagagtgcagtggcacagtctcagctcactgcaacctccaccgcctggctcaagcgatcctcccacctcagcctcccaaggaactgggaccacaggcgcgcaccatcatgcttgcctaatttttgttttcgctttctgtagagatggggtttcaccatgttgcccaagctggtgtcaaactcccagattcaagtgatcctcccgcctcggcctcccatagtcctgggattacaggtgtgaggcatcgcgcccagcctctttggtggttttcaggaacagctagttagttattctgcagatggaggttcaggagcttgcaccacttcctagacccggctggaggagttgggtgtaattttcagccgggcgggtgcaagactcaaagagatgtgtggcagagagaagctgttcagacagcttctggggttgccaggaagaaacaagccacttgctccgatctgcacattccctccctgtccagggctgatttccacccaggcaggactcccgattcccagagaatctcaaagcaaggcattctcctggccgtgatccggctctcagctctaaagggactccatatctttactgcagacccaaatctgtgtcaccacagaggaaaaacggccgcttaattacacttgcatatatgctcgcaagaattcttccagggagcaggatctgggaacgtcctctggagacagggccttccaggagacgctgagctcggtgttggagcatggaggctgaatctaatccatcaacaggatgccacaggggagcagagaattccatttttttttttttgcttcaattcctttctatacaaccgtggttctcaaccaggggtccttctggtccccaggggatgctaggtggtgtctgggggcatttgtgactgttatgactcagggatgctcctggcgtggagtgggtggaggccagggatgctgatcagaaccttgcagtggccaggacaaccccaccccagagaacgacccagccctgaatgccaagggggagagactctgccttaattatttggaaaaatattgtatctgctccctgttgacaccagacactagaaaaaattcccgatggggtggatggcagaaaccaaggggggccccagctcctgcgattctcctcctctctccctccccactcagggtgtggattacaatgtgtgcagcctcctggaacctcaggaggacagaggatcatgagacacagagtttcttggggatctgtggaatcccctaacccccgggggtctcacctgggggtgattctgccccccatggggcactgggcaatgtctggggacatctttggttgtcacaactcggggtgtccctggcatagagtgggtggaggccagggacgctgctcagcaccctacagtgcccaggatggccccacctcagagaacgatctggccccaaggtccacagtgacagagagtgataaccgctgccataatctataggactgaccatagccacatgcatatggtcacacaaacatgagtgtgactgtccctctgactcaaaggacaaagccagtcccaacctttctaaccctgccacctgtgctgaccaccagtggcctctgtgtggatgttagttagggttcagcagccttaggaaaacagaacaccaggcatccagaccttccactgtggccctgagtggaagaggaggtggcggtggccgacgccaacactgtcacagcaagaaacaagagagtgggtgtgactgtggtcacttccatctcagggcacatgctacattgaggaagtaaaacctggggggagcgagatatacaagaagtgaaaggtgacttgtagaatgttctggaatcttccagaagcttctggaaacttccagaattttctgaaatatagtaggtattgtggcatagcaaggctttggattcagaagctgctgggcttgggcacggagtcaaaaaagtaacagaggaaaagccacggaatgcaaacttccagggatgacatggttgccacacagtgggcaggtgggtcacacccactgtacacaggtcacacttggctctttgaactcagtcacctattatgggtggaggaaccaaatcctgggatggggtaataaatgcatacggtttcagtttccccatccacaacacagggagaagaatcagataaggtgtccagtctcggagggtcctgggcagcaggcagcgcctccaagatcatcacctccaaccctgattctgccaagccccagcctggtaactacttctctcaaggggtcccagctctcagagctaggagtggccttcaacgccaggtctacaccccatgccaacagaatcccttccctgacctttgcaccagccaacccatcctccgtcatgcagccttcgacgatcggaaaccaacagcttctcatgacggtccctccgatttccagacaagcctgattcttaagccagcccagccaagctacagctcctatcccatctccccaagaacagacttcatcgttttctgaatttggtccacgcccatggtgtccgtgaggaaaaataacaacataagtaacatatagtacaatgctaattttttgagacgggatcttgctgttgcccaggctggaatgcagtggtgcaatcatagctcactgcagcctcaacttcctaggcttccaagcaatcctcctgcctcagcctcccaagcagctgggaccacaggtgtgcaccaccatatctggctaatttttaataaattttgtagagatagagtctcactatgttgctcaggctggtctcgaactccagggctcaagcaatcctcccacctaagcctcccaaagtgctggaattacaggtgtgagccaccacacccagccaatactaatatttatacataatatattgaataatattagcagtgattccagcaataacagtgataaccaggaccaccacccatccaggtcacagcctcgtagtccatcccaatcttttcaatgaccctagggagtgattcctatcctgtctgacacacaaggaaacagaaaggttccatgttttcttcaaaattcacacagaaagaaagtcacatggtggctaagtaggcattctaaatccaatgcctcaccatgcctacattccagaaaactctagaaggctctgggagtttctagaaggttccagaagattccagaaccctccatgattcgccacctttcactttttacatatcctattcccccaggtcccacttcctcaaagcaggacagaattttcaaccccttgcattcccatctgcatcttcaccttactcattgtattaactccaggcaccaggtagcaccttcctaaattacctgggcttggcaagacctaaatcaaagacatgacctgctcagtagtcccagatgtgaagaaactcaaaatccaatgccagaatcccttaaaacagaaccagtcagtgtccacagctctattaggcttgacccacagtggagaaagatgagaaacccacagggagaaaaacaggaccgtcttcttacagtctaagactgtcagccaggcacggcagctcacgcctgtaaccccagcatcttgggagaccgaggagggaggatcgcttaagcccaggagttcgagcagcctgggcatcatagtaagaccttgtctctttttttttttttttttttttgagacagagtctcgctctgttgcccaggctggagtgcagttgtgcgatctcggctcaccacaacctccacctcccaggttcaagtgattctctctgccttagcctccccgagtaactgggataacaggcacccgccaccatgcctggccaattttagtatttttagtagagatgtggtttcaccatcttggccaggctggtctcaaactcctgacctcaggtgatccacccgcctcggtctcccaaagtgctgggattacaggcatgagccaccttgcccagccacctgtctctattttttaaaaaattaaaacattttaaaattaaaaattaaaagctctgaaaagtgaccacatagactaacagtgggttttttagtaaaatacacttaacacaaaatttacaatttttttttttttttttttttgagatggagtttccctcttgttgcccaggctggaatgcaatggtgagatctcagcccactgcaacctccgcctcctgggttcaagagattctcctgcctcagcctcctaagtagctaggattacaggcatgcatcaccacgcctggctaattttgtattttagtagaggcggggtttctccatgttggtcaggctggtcttgaactcccgacttcattcgtttcttttttgagacagggtcttgctctgttgctcaggctggagtgcggtggtgtgatcacagctcactgcaaccttcgtctcccgagctcgcatgagggtccccatgtcctacctccccgtgagcccttgtgattgtttgttgttctggttttttaattctagccatcttactgggcgtgaagtggtatctcaccatggctctgatttgcatttccctgaggactgacgcggagcatgttttgaagtgaaaccgacagtttttgtttctttgatcctcctgtgtaaccctcccaagtagctgggactacaggtgtgccccagcaggcctggctaatttttatttttattttttttgtagcaaccaactttttttattttattgtttttgagacggagtcttgctctgttgcccaggctggaatgcagtggcacgatctcggctcactgcaacctccacctcccaggttcaagcgattctcctgcctcagcctcccgagtagctgggactacaggcgcccgccaccacgcccggctaattttttgtccttttagtagagatggggtttcaccatattagtcaggatggcttcgatctcctgacctcatgatccgcccgcctcggcctcccaaagtgctgggattgcaggcgtgagcaacctcacccagccggtctccaactcttggactcaagtgatcctcccacctcggcctcccaaagcgctgggatcactagcattagccacatcaccgggccagatccttcttgcgcagtgtttgtgtggacatacgctttcacttcccttaggtgtacgtctaggagtcaactcacagggtcatatggaaacactgtatgtaaccacttcaggaactgccaggctgtttccagagcagctgtaccacatgatgttcccagcagcgacgcatgaggatccccgtgtctctacctccccgtgagcccttgtgattgtttgttgttttggtttttttaattctagccatcctactgggtgtgaagtggtatctcaccatggctttgatttgcatttccctgaggactgatgcggagcatgttttcaagtgaaactgatagtttctgtttctttgtttttgtttgagatggagtcttgctctgttgcccaggctggagtgcagtggcgcaatctcagctcactgcaacctccgcctcccaggttcaagggattctcctgcctcagcctcccaagtagctgggattacaggcgcgcgccaccacgcccggctaattttgtatttttagcagagactgggtttcactatgttggccaggctggtcttgaactcctcacctcaggtgatccacccaccttggcctcccaaagtgctgtgattacaggcgtgagccaccgcgcccggcctgaagctgatagtttttaacatgaggggtcctggtataatcaactccacagctagaaggaagccggagttttacctggaaaaatgtgcaaggaaacgtggctggttccatcacggagatgaaagagtttgtgcaaaatgcagacagagccatctcataaaagagctacagggcgagctgggcacggaggctcacacctgtcatcccagcatttcgggaggccaaggcgggcggatcacgaggtcaggagttcgagaccagcctggccaacatagcgaaaccccgtctctactagaaatacaaaaattggccaggcgtggtggcacgcacctgtagtcccagctactcaggaggctgaggcaggagaatcacttgaacccgggagacggaggttgcagagatcacaccactgcactccagcctgggcaacagggcgagactccatctcaaaaaaaaaaaaaaaaaaaaaaaaagaagagctacagggaggcaggggtcatccctgcccctgctcccaccccatccggtgaagtctcccactccacgccatgagccttggtttcctcatctgaagacagagcctcagaagagctgccaggggttgctctgggggtaactgcaatgctggggtgaggggcaatcggaaacctgcagctgcaactgtaggagtgagggaggcattcaaataacagtctactgcattctagaagattccatcctgggctcactgaataaggactcccggcaggacacggtggctcacgcctgtaatcccagcactttgggagtccgaggcgggcagatcacgaggtcaggagatcgagaccagcctggccaacgtggtgaaaccccatctctttaaattttgtaaaaatacaaaaattagctgggcgtgctggcgcatgcctgtaatcccagctactcgggacgctgaggcacgagaatcgcttgaacccgggaggcagaggttgcagtgagccgagattgtgccactgcactccagcctgggcgacagagaaagactccgtctcaaaaaaaaaaaatagagatgggttctcactatgttgccctaggccagcctgggtgggaggccaggctggtctcgaactcctgacctcaggtgatgtgcctgcctcggctcccaaaatgctgggattacaggtgtgagccaccactcccggccaagacccgcatctctaatttttttaaaaagactattttccccggaatacctgctagatactctccacgccttctgtgtggtcttcttacctgctcttgaggtaggagcctcttctacagataaagccaacaaacaaaaacgatgctcaggccaaagaagaagatgcaggctctgataaagactggcagtggggaggcgggtgggagcccggaaacttcaaggtgtcactgaagcacaaggtgacatcagacagggagaagaaacaggggagctggagcaggcggagatggtgaaagcctgaaccgagggcattccaggtgaggagaaaaacaagagagagaccctggaggaggagggagggaaattaactgagctgtgaaaaacctgcctggggctgaccggctcttgcacagggacgggccagctcgggcagggacgggcttgctgccgggaggtacccgtgcagaaacaagaaaggagctcctgcaggggctggctagggagctggtggacagcatcggccagaggagctcaaatccgccctcagccccagggggccgagctgcaaaagcgacgtcaaatggacaaaaatcccaccgggcacagaagtgcgaccagcaagtctatgggtttaaaaataaatgatggggccgggcgcggtggctcacgcctgtaatcgcagcacttggagaggctgaagccaggtggctcacttgaggtcaggagttcgagaccagcctggccatttttttttttttttttttgagatggagtctcactctgtcgcccaggctggagtgcaatggtgcgatctcggctcactgcaagctcctcctcctgggttcaagcaattctcctgcctcagcctcgcgagtagctgggattacaggggtccgccaccacgcccggataatttttgtatttttagtagagacggggtttcaccatgttggccaggatggtctcgatctcttgacctcgtgatccgcctgcctcaggctcccaaagtgctgggatgacaggcgtgagccaccgtgcccggcccgcaccagtgctgttgatggaggccccaaagtggtagcgacacaagtgaccctggacggatgcacggatcaacgtagcgtggtccatacacaccccggagtatgattcagccttcaacagcaggcaatcctgacacaggccacgatgaggatgcactttgaggacctcagtctcagtgagagaagccaggcacagaaggacacatcctccgtgatccactcctaagaggttcccagagccctcagattcacagagacggaaagtaggatgggggccgggcacagtggctcatgcctgtaatcccagcactttgggaggccgaggcgggtggatcacctgaggtcaggagttcacgaccagcctggccaacatggaaaaacctcgtctctactaaaaatacaaaaattggacgggcgcagtggctcacgcctgtaatcccaacactctgggaggccgaggcgggtggatcacctgaggtcaggagttcaacaccagcctggccaacatggagaaaccttgtctctactaaaaatacaaaaattagacaggcgtggcggcacacgcctgtaatcccagctactcaggaggctgacgcaggagaatcgcttgaacccaggaggcagaggttgcagtgagccaagatcgcacgactgcactccagcctgggtgacaagagcgagactctgtctaaaaaaaaaaaagaaagaaaaaagaaaataaagtaggatgggagtgccaggggctggggagggggctggggagtctgtgcttcatgaggacacagtttcagtttgggaagatgagaaagttctggaggggacagtggttggttaaatgtacccaaaaaatggttaaacggggaaattttatgttacatgtaatttaccacaatgaaaaatgaagagaaggctgggtgcagtgggtcacacctgtaatctcagcactttgggaggccgaggctgaaggatagcttgagcctaggggttggagaccagcctggccaatatagcaagaccccatctctacaaaaaaatttaaaaatcagccgggcgtggtggcatgcacctgtggtcccagctacttgggaggttgagacaggaggatggctggaacccaggaggcagaggctgcagggagctgtgatcgcaccactgcactccagcctgggtgacagagggagaccctgtctcaaagtaaagtaagggaagcaaaacaaaagaaagtgagagaggggaagcagctgagagtcagagacgggggacagggtgggaagtcacgaggccccgtccactgtgtgtcaaacgtcggatgcccagtaacgtccgtgaccgcccggtgtcctcctcccgagacgagggcctggtgggcaggggacggccttgaacacccagcgacaccctgccgttgtttgcccagtgaaaagaggccactaagaaaagggccttggcaaaacaaagggccccattcactgtccccgcgagaggaggcctgagctctttctcgccagagctctcctgtcccggcccagtttcactttccaaggacactccaaccccacctcagcccccaccgatatcctgctttccaacaatcctctgcctttaccagacacttcatcagagcgagaatgtggacccaggggtgtcatcttggtcccagaggccagggggcagaaagtgccagctgtcaggcagtttcccagccgtgtgtggtctctgtctcagcatttttttttttttttgagacagagtctcacgctgtcgcccaggctggagtgcagtggtgcgatctcagctcactgcaacctccgccacccgcgttcaagcgattctcctgcctcagcctcccgagtagctgggattacaggcacccgccaccacgcctggctaattcttgtatttttagtagagacggggtttcaccacattggccaggctggtctccaactactggcctcaggtgatccacccacctcggcctcccaaagtgctgggattataggcgtgagccaccgtacccggcctcccccctcctttttaaaaatgttgcatctcaggcaaagctgcgctcaacaccccggcccggtgcctgcttgcttcagtctccagcactgggatcccggccaatccccgcaacacattcgggaccggcaggacgcatatgtctccaatcagaagggagatgtctctcctgagctctcttcagtgtttgccgccaagatggggaagacgacgagtttccaacaccctgaaacgatcccaaggagcggagcctttgtagggtggggtcaaaagagactttacttactttttttctttcttttttttttttttttgagacagagtctcgctctctcgcccagggtggagtacagtggcacgatctcggctcactgcaagctctgcctcccaggttcacaccattcccctgcctcagcctcctgagtagctgggactacaggcgcccgccaccacatccagctaactttttgtattttttagtagagacggggtttcaccgtgttagccaggatggtctcgatctcctgacctcgtgatccgcccgcctcggcctcccaaagtgctgggattacaggcgtgagccaccgcgcctggccactttttttcttttttttttttttgagacaaggtctggctctgtcacccacactggagtgcaggggcatgatcttggctcactgcagcctcaacttcctgggctcaagcgaccctcctgcctcggactcccgagtagctgggattacaggcatgcgccactatactcagttaatttttttctcttttttgtagagatggtgtcttactatgttgtccaggctggtctcaagctcctgggctcaagcaatcctctcatcttggcctcccaaagtgctggggttaggctgggcatggtggctcacacctgtaatgccagcactttgggaggccgaggcgggtggatcacctgaggtcaggagttcgagaccagcctggccaacatggagaaaccctgcctctactaaaaatacaaaattagccaggcatggtggcccatgcctgtaatcccagctagttgggaggttgaggtaggagaatcgcttgagcccgggaggcagaggttgcggtgagccgagatcgcaccattgcactccagcctgggcaacaagagtgaaactccatctcaaaaaacaaacaaacaaaaaaaagtgctggcatgacaggagtaagccaccagcctggccaagaagtttaaatcatgatgccgggcgcggtggctcacgcctgtaattccagcactttgggaggccgaggcaggcagatcacatggtcaggagttcgagaccagcctggccaacacggcgaaaccccatctctactaaaaatacaaaaaattagccgggcaaggtggcacgcacctgtaatcccaactatttgggaggctgaggcaggagaatcagttgaacctgagtgagctgagatcgtgccactgtactccaacctgggcaacaagaacaaaactctgcctccagataaaatagccgggcgcggtggctcacgcctgtaatcccagcactttgggaggccgagctgggcagatcacaaggtcaggagatcgagactatcctggctaacacggtgaaaccccgtccctactaaaaataacaaaaaattagccgggcatggtggcgggtgcctgtagtcccagttactcgggaggctgaggcaggagaatggtgtaaacccaggaggtggagcttgcagtgagccaagatcgcgccactgcactccagcctgggcgacagagcgagactccgtctcaacaaaagaaaaaagaaatcatgatgcaaagatgaaaagcaaagtttgccgtacgaaggatggagtcggtgtcagtgctctggggaagtggggagttccctcagcaagaatgacctcagagtagctggtaggtgggctaaggccacctgggctgggagaaccaggttaacagcaccagtaggaagtcaccagggtctcaaggatccccagcagggagagagcaacagggcacctcacccctacgtgttctttcccgaaacccgtaaccccggtctgatcacgagagaaatatctgacaaacctagatcagaagtaagtctgcacaatacccagccggtccccctaagaccgtccaggtcacgagaggtaacgaacatctaagacatggtcccaacctggaagaacccccggagacgagccggctaaatgtcacgtgggattctagatgggtcctggggcaggaaaggacattaggggaagattaatgacatttgaataaagtgtggagttgagagaaatgaacccattgttagccgggcacagtggctcccgtctgtcctcctaacactttgggagtccggggtggcaggatcacttgtgttcaggagttcgagaccagcctaggcaaaatagcgagacctcatctctacaataaaacaaaaattagccaggcacggggttgcgtgcctgtggtcccagctactcaggaggctgaggtgggaggatcgcttgagcccaggagttggaggctacagtgagccatgatcactccactgcacttagcctgggcgacagagtaagactctgtctcaaaaaaaaatgtaaatgtaaatttaaaaaatattacttttaatggcaaagaccacaattatgtttgccccaacataataaatacatacaataaataaataaataagaaaaaaataaacaaaaataaaaataatgcaaaaaaaaagggggaaaaaaatgccaatcatactatgcatggcaccgtgttataggggaaaaaaaataattatataaaattgttcccaaatcattaagcccttctcattatggaggctacaggaataaacgctcctaacaagaccacatttgggccgggctcggtgggcctcccagcactttgggaggccaaggcgggtggatcacctgaggtcagaagttcgagaccagcctggccatcatggtgaaaccccgtctctactaaaaatacaaaaaatagccgggtgtggtggtggacgcctgtaatcccagctactcaggaggctaaggcaggaggatcacttgaacctgggaggcggaggctgcagtgagctgagatggcgccattgcactccagcctgggctacagagtgagactccaactcaaaaaaaaaaaaaaaaaaaaaaaaaaaccatattcgatgcaattctctgaagttaactgttagagctctgacaacacagaggctgaaatgacatgacaaatgctaaagtacaaagttccaagatcaagtcccagcatgaccactaactcgtgaaacctccagacctcagttttcccatgcataaagcgtgcgagatggactcgagggccaacacgctttttcggtaagagtccagatacccagtgttttcagccttgcggtggagccactctctacggcaacgacttaactacaccatggtagcagaatacacagagcagtgtgccaataaaacattatttctggacactaaaatctgaatgccatataattgtcatgtgtcatggccttttctttgacttttgttttttgcttcttttggcggcgggtagaagcagggcttcctttgacttttttttccaaccatttaaaaatggaggccgggcacggtggctcacgtctgtaatcccagcactttgggaggccgaagcgaaaggatcacttgaggtcaggagttcgagaccagcctggccaacatggtgaaaccccatctctactaaaaatacaaaaattagccgagtgtggtgtcaggcgcttgtaatcccagctacccgggaggctgaggcaggagaatggcctgaaccgggaggcagagtttgcagtgagccgagatcacaccactgcactccaacctaggtgacagaacgagattctgtctcaaaaaataaaataaaataaaaataaaaatgggataatcattcttagcccaggggccatatataaaaccaggctgtgggccagaggtggcccaagggcggtggttactgactcctggactggacgtgctccaagccccttcctcagctgcctttctaagattctctgattacaaatccatgtgagtttttctatttcaacctgttggctcaggtctttttttttttcttcttgagacagggtcttgctctgtcgcccaggctggagtgcagtggcacaatcttggctcactgcagcctccacctcccagattcaagcaatactcccacctcagcctcctgagtatctggggttacaggcacgcaccaccacgcccaactaagctttgtattgttaataaagacggggtttcaccatgttggccaggctggtctcgaacttctgacctcaagttatccacccacctcagactcccaaactgctgggattacaggtgcgagccaccgcgcccggccagggcagtgaaactataggataccacaatggtggacacgtatccttacacccttctccaaacccgtagaatcttcaacaccaagagtaaactccaatagagactggggactctgggtgacaatgatgtgtcaacgtgggttcatccattgtgattataacgaatgtaccactgtggtacggggtgctggtaatgggggaggctgtgcctgtgggttgcagggaggtgtatgggaactttctgttcttaccgctcgattttgctgtaaacctaaaatagctctaaaaaaataaagtctatttaaaaacccaactgtatctttgtactttaatgcaataaaagaatcataaaatcattagaaatggtttcggcctggctcagtaacgcatatccgtaatcccagcactttgggaggacgggaccagaggattgcttgagctcaggagtttgagaccaacctgggcaacatggcgagaccccatctctactaaaaatggaaaaattagccagtcgtggtgttacatgcttatagtcccagctactcaggaggctgaggtgggagaatcacttgagcctgggaggcggaggttgcagtgaaccaagattgcatcactacactccggcctgggcaacagagcaagactctgtctcaaaaaaaataaaaattaaaaaaataataataaaaggaaaagagccgggcgtggtggctcacgcctgtaatcccagcactttgggaagccgaggtggaaggatcacctgaggtcaggagttcgagaccagcctggccaacatggtgaaaccccgtttctactaaaaataccaaaattagctgggcgtggtggcacacgcctgtaatcccagctactcgggaggctgaggcaggagaattgcttgaacccgggaggcggaggttgcagtgagctgagatcatgccaccgcactccagcctgggcagcagagcaagattgcatctcaaaaaaaaaaaaaaaaagaggagggaaatttccacggacacccggggagaaggccttttgtgatgacagaggcagaaattggatcaatgaggccataagccaaggactcctggagcccccagggggtgggggaggcagtacgcctccttccctggagcctctagaaggagcgcagccctgctcacaccgtgacttcagactcctggtctccagaaccatgagacaatacatttctgttattttaccacccggtctgtggtcattcatgacggcggcagccccaggctcctcctacaactgggtactgccaaggccagcgaagtccaggccttactttccgaccacattgaagccacagccgtctctgtgcccagcagactctgccaggacatctgcatttgaacttggctggattcacctcttttctttgattcctcctggctttgttgtccatcaagttagggagttttttaagaaggccaggggaggccgggcgcggtggctcacgcctgtaatcccagcactttgggaggccgaggtaggcagatcatgaggtcaggagatcgagaccatcctggctaacacggtgaaaccccatctctactaaaaatacaaaaaatcagccgggtgtggtggcgggcgtctgtagtcccagctactcgggaggctgaggcaggagaatggcgtgaacccgggaggtggagcttgcagtgagccgagatcgcgccactgcactccagcctgggcgacagagtgagactccatctcgaaaaaaaaaaaaaagaaggccaggggcagcagtcttgggcttgtcaacaaaggtcaaatgaacaatgaagtccgacgtggtggctcacacctgtaattctagaatgtgggccggctgcggtgggcgaatcacttgagcccaggagttcaagaccagcctggacaacacagcaagacccggtctctacaaaagatacaaaaattagccaggtgtggtggtacatgcttgtggtcttggccatctgggaggctgaggcaggaggatcacttgaacctgggagttcaaggctgcagtgagctgcgattgtgccactgcactccagcctgggtaacggagtaagcccctatctcattaaaaagaaaagtagatgttcagccaggcacagtggttcatgtctgtaatcccaacactttgggagtctgaagtgggtggatcacttgagctcaggggttcaagaccagcctgggcaacatagtgagactccatctctacaaaaaattagccggatatggtgacatgtgcctgtagtcccagctactctggaggctgaggcaggaggatcgcttgagcccaggagtttgagaccagtctaggcaacatagcaatatcctatctttacaaaaaaaaaaaattagctgggcatagtgatctctgcctgtattcccagctactcaggaggtcgaggtgggaggattgcttgagccagggaggtggaggttgcagtgagccaagatcacaccactgtactccagcctgggtgacagagcgagactctgcctcaaaaaaaaaaaaaaagaaagaaagaaaaaaagaaagaaaagaaaagcagactttcaactaattaacatacatcaaaggtagtctttttctactttaccatcttccaaagagtaactgtacagaaactccaaaaaggtagccatttctgcaaaccagggtctctcccctgggcactgtggacatcggagctctggactattctctggggtgcggccatcctgggcactgcagggcgctgagcagtgtccatggcatccacccactccatgccaggagcagccccggttgtgacagccacaaatgtccccagacgttgctcagtgtcccctgaaggccagaatcacccccagggacaagctctgatttagggcatggctggacatgagacagagacagcaccagataaatgcgtcaagggttaaagaatgaacgcccacattctacccacaacccccccaagtctctaatcaaatgccgcctcctcttggaggctctcagaggtcgaggtccctgtcttcattttgtaaacccatcactcgacacaatatcagacacttaatattgtgttgtgaacgttaataaatgtctgtaaaataaatgactctgaccttgaaacggcaatgtctctatgcctaagaaatcttggttgtttgaggataaaattatcttcctttctctctctggggttgggctacatttgagattgtaaggctgggtaagcacaggggatttgggtcagaaatgtcaaggctatctggaattggtgacactatttttggaggaatctacattttggggagatttttttgttgcttttttttgggggggggcagggaatagcacttaactagttcaaccatagtttttaggggaaaaaaaaaagttttagttgaaaggatctgttctaccatagcctggtatagagcagtggttctcaaccccagatgactgtggacaatgtctggggacatcggtggctgtcacaactcagagatgctcctggcgtggagtgggtggagcccagagacgctgctcagcaccctgcagtgcccaggacggccccaccccagagaacaatccggtcccccctatctgcagtactaagagggagcccctacattatttgggaaaaaaatcaagtctgcttcctgatcacactagacaccagaataaactcccaatggggcagacagtgtaaatcagggggacccccagcttctggggctcacctcctctctccctccccactcagggtgtggatttcaatgtgtgcagcctcctgggacctcagcagggcagaggatcatgggacgcggagtctcttggagtccgtggactcccctagcccaggtgtgatctgctccctgagggacactgggctatgtctggggacatctgtggttgtcacaactggaggtgctcctggcgtggagtgggtggaggccagggacgctgctcggcacctcaggacctgcagtgcccaggacagccctgccccagaaaatgaccctactcaggccatcacagggtagggttgaactcgagctcaggagttcgagaccagcctaggcaatacagggggacctccacgtttacaaaaaaaagttttaattagctgggcatggtggcgtgcatctgtagtcccagctactctgggaggctgaggtgggaggattgcttgagcccggagtttgaggctgcagtgagccaggctgagaaaatgtgtggtgagtggcatggggagacctagcgccctctgtgtacccaccaagatgggccagtctccaccaatccgttccctggcaaacttgtattctactcaaagcttcctcgtggcctcctgtctggaccttccgcagccccctctctacccccctggacgacttcttatcacccctgcacctattcagctcctagaacacacaggcccgaggcccccacctctgtgccaccctgggctcaggcccctctgacccagactgccatctccacggcccccacaccagcacacagatgcctcattcacgtggtgctcccagggcctggcaccagttctgaggcttaaaataggcacacaacgggcctttgtcggatagaggaaggaaggaaggagcgtttcagacaaaggagacagcaacagcagcgtccaggaaacccaggggcaccggggaggtggatggagccaagtgggggtggggtacttgaagggtcagagggcagggccaggccatgcaggaccctgaagaccccatgaggaactggggtgccatcatgtgggtgctgacttgataggaggcagggaagtgaccgtctgatcagtgcccaggaagcttactaggaaggtcctgctggagctggagaaaccagaggctgattcgtcacctcggagtctcccgccagggatgatgaggctctcggctcaagagggagcactgagatgggaaagaaagcagacagaaggggccgggcatgggggctcacgcctgtaatcccagcactttgggaggccgaggcgggcagatcacctgaggtcaggagttcgagaccagcctgggcaacatggtgaaaccctgtttctactaaacataaaaattatctgggtgtggtggtgcatgcctgtaatcccagctactcgggaggctgaggcaggagaatcactggaacctgggaggtggaggttgcagtgagccgagattgcaccactgcactccagcccgggagacagagcaagactccgtcaaaaaaaaagaaaagagagaaagagagagaggagagagaggggagagaggggagagagggaagagaggagagagaggagagagagaaagaaaaagaaaaaagaaagaaagagaaggagagaaagaaaaagagagagagagaaagaaagaaagaaagaaagaaagaaagaaagaaagaaagaaagaaagaaagaaaagaaagaaaagaaagaaagaaaggaaaggaagggaagaaagaaaggaaagacgaaggaagaaggaaggaaggaaggaaagaaagaaagaaagagaaagaaagaaccactaaacaaacatcccaagcttcagtgcagtggactgcctgtgcccaggaaaaagccatttacatcccagcactgtgctccattgcccaaaggcaaaagcggccgagcgtgtgttgctgaatggatggatgagcacagcccggcctgtccacgcaccggaacacgactcagccctgaaaagggtcgaggctctgacgcaggccacagcacggatgcaccttgagcatgtcacacgcagtgagagacaccagacacaaaaggccacacagtgtgtgacccatttctttgaaatgtctaggacaggccagtccagagacaggagggagaggcgtgggtgccagggctgggggagggggtggagagtccccctcatggggacaaaagattttactaggtgatggaatgtttttttgtttgtttgttttttgagacagagtctcgctctgttgcccaggctggagtgcagtgctcaccgcaacctccgcctcccaggttcaagcgattctcctgcctcagcctcctgagtagctgggattacaggcgcccggctaatttttgtatttttactagcgacagggtttcgccatgttggccagactggtctcgaactcctgacctcaactgatccacctgcttcggcctcccaaaatgctgggatcacaggaatgttctgaaaggggcttatagggatgtttgcacagctgataaacttatttaaaagatggaattgcatccttaaaaggtctgaatgttatgaagtgtaaattatacctcaatttttgtcataaaaagcagtaagacttttccttttgcgaggttcaagtaactgttcgtggaagcgtctcggagctgcccacgaaccccaccgcccatccgtgtcaggagccgatgtgggggagcaaccacacagagagagcgtggcccactcacgccgcaggatgggggaggaggaggacaggagtgacccctcgggggccgctgtgtgactgaggatgggtcagcccatctccttagctctcacactcatcggtagggtctcctgggtgacgtaaaccatgaacacttttctctaacccttaagagacagaggccaggccaaagagtgcatgtataaaaagcagtgacaagtgaagtcaagaaatgtcaacgagcggggagaggcgcccgacatcaacaaggacgcagaattgcagaaatcagccgtgaaaggacacagcggccgggcgcggtggctcacgcctgtcaccccagcactttgggaggctgaggtgggtggatgacctaaggtcaggagttcgaggccagcctggccaacatggtgagggccccgtccccccccccgcccgtctctactaaaaatacaaaaattagccgggcgtggtggcacatgcctgtaatggaagctactcgggaggctggggcaggagaatcgcttgaacccgggaggcggaggttgcaatgagacaagatggcgccactgcactccagcctgggcaatgaacgagaccacatctcaaaaacaaaagacaggccgggtgcgggggctcatgcttataatcccagcactttgggaggtcgaggcaggtggatcaccagaggtcaggagttccagaccagcctggctaacatggtgaaactccgtctctactaaaaatacaaaaattagctgggtgtggtggtgggtgcctgtagtcccagctactcgggaggctgaggcaggagaatggcttgaacccaggaggcagaggttgcagtgagccgagatcgcaccactgtactccagcccgggcaacggaatgagaccatgtctcaaaaaaaaaaggacaggccgggcgcggtggctcacgcctgtaatcccaacactttgggaggccgaggtaggtggatcacctgaggtcaggagtttgagaccagcctgggcaatatggtgaaaccccgtctctactaaaaatataaaaattagccgggtgcagtggtgtacgcccataatcccagctactcgagaggatgaggcagaagaattgcttgagccctggaggcggaggttgcagtgagccaagattgcaccattgcactccagccttggtgacagagaaagactgtgtttcaaaaaagaaaaaaaaaagaaagaaaagaaaaaaagaaagcaccagctcccaagcctatagagaccaggcacgaccttcctgtaagaaaccatgaagcatcttcaaaaatacaaatgactctggatacgattttaaagaccatcgctgcttccagatggaactgaaaaaatccgaataacaccttgaatgaagaaaggagtgttttccactactatcggtgaacaagaaaaatgcctccattcagtaaacacgaagctgaattgtctacacgtgagggtaatttgtgtttagttctctttgccttcaaacagtggggccccagggtttacgaagcatgaaacaagaacagaaaataacggtatcggtcaaaggatgttttctaaataaagctcctctgtaagatcgagacgcacctgcagaatttgagcttcgttggaagcttcacgttccaggttaaaaccaagaaagcacattgcaaacattgtcatcttccaatgcttgcaactgacaacttcaggccatcttctaaatcagtactaagtgttcaaaagccacataaaaggcccacctagaaaggagtagcctttttttttttttttttttgagacagagtctcactctgtggcccaggctggagtgcagtggtgcaatctcagctcactgcaacctctgcctcctgggttcaggtgattctcctgcctcagccccccaagtagctgggattacaggcgtgtgctaccacgcccagttagtttttgtatttttagtacagatggggtttcaccatgttggccaggatggtcttgaattcctgacctcaagtgatccacccacttcggcctcccaaagtgctgagattacaggcgtgagccaccgcacccagccataagtaggcatttctaatgttttctaaaagcagtgagaccttacttctcccctctccgaatgacagcactaaatgacttaaaagcaatcctcaattctgaatgaccccacttcctgcacatcaaaggggagatgaggtcgttaaaggagaaaataaatcagttttgtctataacaagggttccacactggagtatctctgtccctacaggacgctgggtgatatccggagacatctgtggttgtcacaatgcggggagctcctggtgtggagtgggtggaggtcagggatgctgctcggcaccctgcagtgcccagaaggccccaccccagaggacaatcagatcccaaatgtccgcagcgctgggatagagagacccagacgcaccccatgaactgaagttgtaaactcaaaatttcaagcgtataatcacagctcgatgtggttccttacggggtgcccctaatcagaatgacccaggcagccttctcttgaacaggtgcatctgttacttaacgagctttgagactctcctgccaccaggtgtgggcaaagtcttctttcttttcagttttttactcacttttaataatatggaaacaggctccatatttgagactctgtctcaacataataataataataacaataataataagacatatttttgttgttgttgcagtcctttttttttttttcctttatttttttgaggcagagtctctctctgttgcccaggctggagtgcaatggcgtgatcttggctcactgcaacctccacctcctgggttcaagcgattctcctgcttcagcctcccaagtagctgggattacaggcaaacgccactatgcccagctaatttttgatatttttagtagagacaggttttcgctatattggccaggctggtctcaaactcctgacctcaggtgatccacccgcctcggcctcccaaagcgcggggattacaggcatgagccaccacaaccagccatgcaggttattttttaaagcttctgggggtgaccctgatgtgtgctcctaaggttgcaggactagagtcaagttccagtcacttcctttcctctcctctgtgacaacccagtcatcccactcctccatctccaaacccaccaaagaaaaaaactggattgagtccattattctccatgcttcaggtaccctcactatatgctaggaaatagtccatgcatacatcccgtaattcgaccctgagaggcacatgctactgtttttattattcccgctttgcaggggagtaaacaacacctccaaaagatgatacagccaaatccgcagcgagaggctgggtcggaacacacacaggcgcacctcccagaggcccccgacactccatcaaggcaagatcgcagcatcccacgacgggaacaagtttgtgaacttggcatttgcctcgctgacacctagcaaccgtgtgaagacgcttagctggggatccgctgcctctgttcatcaagcctgtcttccaccgcccacctcccaacccctagcaacccccgctccccaggaaaaataaagtgccacccacgtcgctcaatagcaccgtcccaaaaactcccactttagttcctgaaaaattcagtcaccgacaggagcctttctccttcctgaagcgttctccttggcaccctatatcctagaaataaacctcaaaaagtattccgaactcccgtctccttcaactcactgttccccagggggttctgccccgtgcccagttctagagcaaacaattaacatctcccccaaaagtagaggggtgagtcctctccaaattccttttaactggatcctacctgagacacctccccacaccccgttttcctcctgattagtcaatgtctagcaaaacacctgcccccaggtgtctccagcctgggaccttacccccacctcccttctcactaactcaccccaacttccttctccctgaacccccttccaccccacacactcacaagctccccatttcccctgatagcccccagaccctttctggaacaagcctgacccccacctgtatgctccagccactccctggctcaccccagctttgtccttctgccccttttcagctaaccctaacccctgggccgtcaatcacacccccccatcttcaccaaccccattcctcagtcctctccccagacaacctcaacatctaattccctctgcagccccctctccaatgaaccccacttcaaactccatccccagccccctctccagctccctgcaaacctcaaccccactcccagctccctcttcaaagaagctgcacccttgactcaacccctgttccccgctccaattaacctcaacccccaacaccatccccagcgtcctccccagctaactcagatttccaattccacttccagccccctccccagctaacctcgacctacaattccagccccctccccagctagcttggacctccaatcccactccaagccccctcggcagctaacctcgacctgcgactctagccccctccccagcaaactcaagacctccaattccaccaccagccccttcctagctaacctggacctgcaattccagacccctccccagccaactcagacctccaatcccgctccaagctccctccccagctaacctcgacctgcaactccagtcccctccccagataactcagacctccagtctcacccccagccccctcctcagctaactcagacctccaatcccacctccagccccctccccagctaacctggacctgcaactccagcctcctccccagctggccctgatttctaagtggagtcccaatgcccagacccaatccttccccagctaacctcgatctgcaccccctgccccgtccccagctaacctcgacctgcaactcccgccccctccccagctagccctgagccccaagtgcagtcccaatccccaaccccagcccctccccagctaacttcgaccccctaagcgcagccccgtccccaattccaaccccagcctccagttgcagcccgggtccccagacccagcccccctcctcagccgactccgacccccaactcggtccgcagccgaatccgagctgtcccagtcccctctccgggacgccggccgcgccctcacttcccctggcccggttcgcgggcgcccttacctgcgctcgggccccgcggccgcctcagccccgccgcgcagccgaaccctccgccccggcccgcgagcgctcgctcccctctgcgggggcggggccgacactcggggggcgggccctggcgtcccggcaaggccaatcgcgagccccggctgcgggaggccggagcgggggcggggcgcggggcaggcagcggggtaggctgcgcccaggagagtggggcggggctccgggcgcgggcggggccgggggcggggcgaagagcggctttccagggtgacttcgtgacgtcaggaaggcgcgagtagtttcgcgagttcgaatcccgcgctaggtgagctggttcgaatcctgcatgccagctccgggggctcatttgctggggaagaatgtcagtgatcataactgctgcaccgctttcttgaagactttataggctccctctcgtgggaccctccgcataaggccagaaggcgagattactatccacattttacagaggtggaaactgggtctcagaaaggtgaaacctaaggtcatttgcccaagcctgtctcatcatttccaagatttctcagtttcctaactcatggccctggatccacaaattcctgagccccaacacagatggaatgaaccagaatcctatagggaactggaccctgaaatctgtgttttgtttagttttcgttttgtttttgagacagggtatcactcaattgccgtggctggactgcagtggtgcagtcatagctcactgcagctttgaagtcccaggctcaagcagtccttccacctcagccttccgggtagctggggccacaggcacgcaccaccacatccagctaatttttgtattattagtagagacagggtttcaccgttttggccaggctggtctccaactcctgacctcaggtgatccacctttcttggcctcccatagtgctgggattacaggcgtgagccaccgtgcctggccctggctaatttttttttgttagagatggggtcttgctatgttgcccaaactggtcttgaactcctgggctcaagtgattctcctgcctctgcctcccaaaatgcttggattacaggcctggaatcttcattttccacaagctcccttgggaatattggaaaacactttgtatgtctccaaaagcagtacacagccctggaaggaagatggagccaccatattctgtgacctcagggatttcatcaggcgctgacactgtgtgtccttgccgccccacctgagccctgggattggagctgctggccaaaatccaagataaacttccccagggttcctgtcatccctgcaagaacctccctgctcatcctctggactccagtggcctgccctgcagggcacagagaaacctccatctccctgcttgccctcctccaggctctccccagctggcatcccccaagaggaatgactgtctagatagagcttgggaagggcacggtggctcacgactgtattcccagcactttgggaggctgaagcgggaggatcgcttgagcccaggagttcaagaccagcctggcaacatactgagaccgcaactctacaaaaaaattaaaatattag
